(19) United States
(12) Patent Application Publication
(10) Pub. No.: US 2017/0129961 A1
(43) Pub. Date: May 11, 2017

(54) ANTIBODY CONSTRUCTS FOR CD70 AND CD3

(71) Applicants: AMGEN RESEARCH (MUNICH) GMBH, Munich (DE); AMGEN INC., Thousand Oaks, CA (US)

(72) Inventors: Tobias Raum, Munich (DE); Claudia Blümel, Munich (DE); Wibke Deisting, Munich (DE); Patrick Hoffmann, Munich (DE); Ralf Lutterbüse, Munich (DE); Elisabeth Nahrwold, Munich (DE); Olivier Nolan-Stevaux, Millbrae, CA (US); Marc Panzer, Munich (DE)

(21) Appl. No.: 15/225,282

(22) Filed: Aug. 1, 2016

Related U.S. Application Data
(60) Provisional application No. 62/290,886, filed on Feb. 3, 2016.
(60) Provisional application No. 62/199,935, filed on Jul. 31, 2015.

(51) Int. Cl. C07K 16/28; C07K 16/30

(52) U.S. Cl. CPC C07K 16/2875; C07K 16/2809; C07K 16/3069; C07K 2317/31; C07K 2317/565; C07K 2317/56; C07K 2317/92; C07K 2317/33; C07K 2317/73; C07K 2317/94

(57) ABSTRACT

The present invention relates to a bispecific antibody construct comprising a first binding domain which binds to human CD70 on the surface of a target cell and a second binding domain which binds to human CD3 on the surface of a T cell. Moreover, the invention provides a polynucleotide encoding the antibody construct, a vector comprising said polynucleotide and a host cell transformed or transfected with said polynucleotide or vector. Furthermore, the invention provides a process for the production of the antibody construct of the invention, a medical use of said antibody construct and a kit comprising said antibody construct.

[0001] The present invention relates to a bispecific antibody construct comprising a first binding domain which binds to human CD70 on the surface of a target cell and a second binding domain which binds to human CD3 on the surface of a T cell. Moreover, the invention provides a polynucleotide encoding the antibody construct, a vector comprising said polynucleotide and a host cell transformed or transfected with said polynucleotide or vector. Furthermore, the invention provides a process for the production of the antibody construct of the invention, a medical use of said antibody construct and a kit comprising said antibody construct.

[0002] CD70 (CD27L, TNFSF7) is a type II integral membrane protein whose normal expression is restricted to a subset of activated T and B cells, mature dendritic cells and thymic medullar epithelial cells. The biological functions of CD70 are mediated via binding to the CD27 receptor, which is expressed on lymphocytes and NK cells. CD70 interactions regulate B-cell maturation, T-cell co-stimulation and memory T cell function. Genetic ablation of CD27 in mice, which abrogates CD70 signaling, does not impact the development of B and T cells, but interferes with memory responses to viral re-challenge.

[0003] In addition to its highly restricted normal expression, aberrant CD70 expression has been documented in 60% of Non-Hodgkin Lymphoma (NHL), 70% of clear cell renal cell carcinoma (ccRCC), 40% of papillary RCC, as well as 25% of pancreatic adenocarcinoma, 22% of laryngeal/pharyngeal carcinoma, 15% of ovarian carcinoma, and 10% of lung adenocarcinoma and glioblastoma.

[0004] Each year, 14,080 people die of metastatic RCC in the U.S. (American Cancer Society: Cancer Facts and Figures. 2015). While all patients are treated with angiogenesis inhibitors (Bevacizumab, Sunitinib, Sorafenib, Axitinib) or mTOR inhibitors (Temsirolimus, Everolimus), the 5-year survival rate for patients with metastatic RCC remains dismally low at 20% (American Cancer Society: Cancer Facts and Figures 2015). A significant unmet medical need remains for this disease, and up to 10,000 patients a year presenting with CD70-expressing metastatic ccRCC could benefit from a CD70-targeted therapy in the U.S.

[0005] Diffuse large cell B cell lymphoma (DLBCL) is the largest NHL sub-type with 28,740 new cases per year in the U.S. (American Cancer Society: Cancer Facts and Figures, 2015). 71% of DLBCL tumors express CD70, and while most patients initially respond to standard of care therapy (Rituxan plus cyclophosphamide, adriamycin, vincristine, prednisone), many relapse or are refractory, and 19,790 patients die of this disease every year (American Cancer Society: Cancer Facts and Figures 2015). Therefore a clear unmet medical need remains for DLCBL, and up to 14,000 patients a year presenting with CD70-expressing DLBCL could benefit from a CD70-targeted therapy in the U.S.

[0006] Based on the number of patients dying each year in the U.S. of pancreatic (40,560), laryngeal and pharyngeal (6,300), ovarian (14,180), and lung (158,000) carcinoma (American Cancer Society: Cancer Facts and Figures, 2015), and taking into account the CD70 expression prevalence in these cancer types, up to 30,000 additional patients a year with unmet medical needs presenting with CD70-expressing solid tumors could benefit from a CD70-targeted therapy in the U.S.

[0007] As there is still a need for having available further options for the treatment cancer diseases related to the overexpression of CD70, such as the ones discussed herein above, there are provided herewith means and methods for the solution of this problem in the form of a bispecific CD70×CD3 antibody construct.

[0008] Thus, in a first aspect, the present invention provides a bispecific antibody construct comprising a first binding domain which binds to human CD70 on the surface of a target cell and a second binding domain which binds to human CD3 on the surface of a T cell.

[0009] It must be noted that as used herein, the singular forms “a”, “an”, and “the” include plural references unless the context clearly indicates otherwise. Thus, for example, reference to “a reagent” includes one or more of such different reagents and reference to “the method” includes reference to equivalent steps and methods known to those of ordinary skill in the art that could be modified or substituted for the methods described herein.

[0010] Unless otherwise indicated, the term “at least” preceding a series of elements is to be understood to refer to every element in the series. Those skilled in the art will recognize, or be able to ascertain using no more than routine experimentation, many equivalents to the specific embodiments of the invention described herein. Such equivalents are intended to be encompassed by the present invention.

[0011] The term “and/or” wherever used herein includes the meaning of “and”, “or” and “all or any other combination of the elements connected by said term”.

[0012] The term “about” or “approximately” as used herein means within ±20%, preferably within ±15%, more preferably within ±10%, and most preferably within ±5% of a given value or range.

[0013] Throughout this specification and the claims which follow, unless the context requires otherwise, the word “comprise”, and variations such as “comprises” and “comprising”, will be understood to imply the inclusion of a stated integer or step or group of integers or steps but not the exclusion of any other integer or step or group of integer or step. When used herein the term “comprising” can be substituted with the term “containing” or “including” or sometimes when used herein with the term “having”.

[0014] When used herein “consisting of” excludes any element, step, or ingredient not specified in the claim element. When used herein, “consisting essentially of” does not exclude materials or steps that do not materially affect the basic and novel characteristics of the claim.

[0015] In each instance herein any of the terms “comprising”, “consisting essentially of” and “consisting of” may be replaced with either of the other two terms.

[0016] The term “antibody construct” refers to a molecule in which the structure and/or function is/are based on the structure and/or function of an antibody, e.g., of a full-length or whole immunoglobulin molecule. An antibody construct is hence capable of binding to its specific target or antigen. Furthermore, an antibody construct according to the invention comprises the minimum structural requirements of an antibody which allow for the target binding. This minimum requirement may e.g. be defined by the presence of at least the three light chain CDRs (i.e. CDR1, CDR2 and CDR3 of the VL region) and/or the three heavy chain CDRs (i.e. CDR1, CDR2 and CDR3 of the VH region), preferably of all six CDRs. The antibodies on which the constructs according to the invention are based include for example monoclonal, recombinant, chimeric, deimmunized, humanized and human antibodies.

[0017] Within the definition of “antibody constructs” according to the invention are full-length or whole antibodies also including camelid antibodies and other immunoglobulin antibodies generated by biotechnological or protein engineering methods or processes. These full-length antibodies may be for example monoclonal, recombinant, chimeric, deimmunized, humanized and human antibodies. Also within the definition of “antibody constructs” are fragments of full-length antibodies, such as VH, VHH, VL, (s)dAb, Fv, Fd, Fab, Fab′, F(ab′)2 or “r IgG” (“half antibody”). Antibody constructs according to the invention may also be modified fragments of antibodies, also called antibody variants, such as scFv, di-scFv or bi(s)-scFv, scFv-Fc, scFv-zipper, scFab, Fab2, Fab3, diabodies, single chain diabodies, tandem diabodies (Tandab's), tandem di-scFv, tandem tri-scFv, “minibodies” exemplified by a structure which is as follows: (VH-VL-CH3)2, (scFv-CH3)2, ((scFv)2-CH3+CH3), ((scFv)2-CH3) or (scFv-CH3-scFv)2, multibodies such as triabodies or tetrabodies, and single domain antibodies such as nanobodies or single variable domain antibodies comprising merely one variable domain, which might be VHH, VH or VL, that specifically bind an antigen or epitope independently of other V regions or domains. Further preferred formats of the antibody constructs according to the invention are cross bodies, maxi bodies, hetero Fc constructs and mono Fc constructs. Examples for those formats will be described herein below.

[0018] A binding domain may typically comprise an antibody light chain variable region (VL) and an antibody heavy chain variable region (VH); however, it does not have to comprise both. Fd fragments, for example, have two VH regions and often retain some antigen-binding function of the intact antigen-binding domain. Additional examples for the format of antibody fragments, antibody variants or binding domains include (1) a Fab fragment, a monovalent fragment having the VL, VH, CL and CH1 domains; (2) a F(ab′)2 fragment, a bivalent fragment having two Fab fragments linked by a disulfide bridge at the hinge region; (3) an Fd fragment having the two VH and CH1 domains; (4) an Fv fragment having the VL and VH domains of a single arm of an antibody, (5) a dAb fragment (Ward et al., (1989) Nature 341:544-546), which has a VH domain; (6) an isolated complementarity determining region (CDR), and (7) a single chain Fv (scFv), the latter being preferred (for example, derived from an scFv-library). Examples for embodiments of antibody constructs according to the invention are e.g. described in WO 00/006605, WO 2005/040220, WO 2008/119567, WO 2010/037838, WO 2013/026837, WO 2013/026833, US 2014/0308285, US 2014/0302037, WO 2014/144722, WO 2014/151910, and WO 2015/048272.

[0019] Furthermore, the definition of the term “antibody construct” includes monovalent, bivalent and polyvalent/multivalent constructs and, thus, monospecific constructs, specifically binding to only one antigenic structure, as well as bispecific and polyspecific/multispecific constructs, which specifically bind more than one antigenic structure, e.g. two, three or more, through distinct binding domains. Moreover, the definition of the term “antibody construct” includes molecules consisting of only one polypeptide chain as well as molecules consisting of more than one polypeptide chain, which chains can be either identical (homodimers, homotrimers or homo oligomers) or different (heterodimer, heterotrimer or heterooligomer). Examples for the above identified antibodies and variants or derivatives thereof are described inter alia in Harlow and Lane, Antibodies a laboratory manual, CSHL Press (1988) and Using Antibodies: a laboratory manual, CSHL Press (1999), Kontermann and Dübel, Antibody Engineering, Springer, 2nd ed. 2010 and Little, Recombinant Antibodies for Immunotherapy, Cambridge University Press 2009.

[0020] The antibody constructs of the present invention are preferably “in vitro generated antibody constructs”. This term refers to an antibody construct according to the above definition where all or part of the variable region (e.g., at least one CDR) is generated in a non-immune cell selection, e.g., an in vitro phage display, protein chip or any other method in which candidate sequences can be tested for their ability to bind to an antigen. This term thus preferably excludes sequences generated solely by genomic rearrangement in an immune cell in an animal. A “recombinant antibody” is an antibody made through the use of recombinant DNA technology or genetic engineering.

[0021] The term “monoclonal antibody” (mAb) or monoclonal antibody construct as used herein refers to an antibody obtained from a population of substantially homogeneous antibodies, i.e., the individual antibodies comprising the population are identical except for possible naturally occurring mutations and/or post-translation modifications (e.g., isomerizations, amidations) that may be present in minor amounts. Monoclonal antibodies are highly specific, being directed against a single antigenic site or determinant on the antigen, in contrast to conventional (polyclonal) antibody preparations which typically include different antibodies directed against different determinants (or epitopes). In addition to their specificity, the monoclonal antibodies are advantageous in that they are synthesized by the hybridoma culture, hence uncontaminated by other immunoglobulins. The modifier “monoclonal” indicates the character of the antibody as being obtained from a substantially homogeneous population of antibodies, and is not to be construed as requiring production of the antibody by any particular method.

[0022] For the preparation of monoclonal antibodies, any technique providing antibodies produced by continuous cell line cultures can be used. For example, monoclonal antibodies to be used may be made by the hybridoma method first described by Koehler et al., Nature, 256: 495 (1975), or may be made by recombinant DNA methods (see, e.g., U.S. Pat. No. 4,816,567). Examples for further techniques to produce human monoclonal antibodies include the trioma technique, the human B-cell hybridoma technique (Kozbor, Immunology Today 4 (1983), 72) and the EBV-hybridoma technique (Cole et al., Monoclonal Antibodies and Cancer Therapy, Alan R. Liss, Inc. (1985), 77-96).

[0023] Hybridomas can then be screened using standard methods, such as enzyme-linked immunosorbent assay (ELISA) and surface plasmon resonance (BIACORE™) analysis, to identify one or more hybridomas that produce an antibody that specifically binds with a specified antigen. Any form of the relevant antigen may be used as the immunogen, e.g., recombinant antigen, naturally occurring forms, any variants or fragments thereof, as well as an antigenic peptide thereof. Surface plasmon resonance as employed in the BIAcore system can be used to increase the efficiency of phage antibodies which bind to an epitope of a target antigen, such as CD70 or CD3 epsilon (Schier, Human Antibodies Hybridomas 7 (1996), 97-105; Malmborg, J. Immunol. Methods 183 (1995), 7-13).

[0024] Another exemplary method of making monoclonal antibodies includes screening protein expression libraries, e.g., phage display or ribosome display libraries. Phage display is described, for example, in Ladner et al., U.S. Pat. No. 5,223,409; Smith (1985) Science 228:1315-1317, Clackson et al., Nature, 352: 624-628 (1991) and Marks et al., J. Mol. Biol., 222: 581-597 (1991).

[0025] In addition to the use of display libraries, the relevant antigen can be used to immunize a non-human animal, e.g., a rodent (such as a mouse, hamster, rabbit or rat). In one embodiment, the non-human animal includes at least a part of a human immunoglobulin gene. For example, it is possible to engineer mouse strains deficient in mouse antibody production with large fragments of the human Ig (immunoglobulin) loci. Using the hybridoma technology, antigen-specific monoclonal antibodies derived from the genes with the desired specificity may be produced and selected. See, e.g., XENOMOUSE™, Green et al. (1994) Nature Genetics 7:13-21, US 2003-0070185, WO 96/34096, and WO 96/33735.

[0026] A monoclonal antibody can also be obtained from a non-human animal, and then modified, e.g., humanized, deimmunized, rendered chimeric etc., using recombinant DNA techniques known in the art. Examples of modified antibody constructs include humanized variants of non-human antibodies, “affinity matured” antibodies (see, e.g. Hawkins et al. J. Mol. Biol. 254, 889-896 (1992) and Lowman et al., Biochemistry 30, 10832-10837 (1991)) and antibody mutants with altered effector function(s) (see, e.g., U.S. Pat. No. 5,648,260, Kontermann and Dübel (2010), loc. cit. and Little (2009), loc. cit.).

[0027] In immunology, affinity maturation is the process by which B cells produce antibodies with increased affinity for antigen during the course of an immune response. With repeated exposures to the same antigen, a host will produce antibodies of successively greater affinities. Like the natural prototype, the in vitro affinity maturation is based on the principles of mutation and selection. The in vitro affinity maturation has successfully been used to optimize antibodies, antibody constructs, and antibody fragments. Random mutations inside the CDRs are introduced using radiation, chemical mutagens or error-prone PCR. In addition, the genetical diversity can be increased by chain shuffling. Two or three rounds of mutation and selection using display methods like phage display usually results in antibody fragments with affinities in the low nanomolar range.

[0028] A preferred type of an amino acid substitutional varianation of the antibody constructs involves substituting one or more hypervariable region residues of a parent antibody (e. g. a humanized or human antibody). Generally, the resulting variant(s) selected for further development will have improved biological properties relative to the parent antibody from which they are generated. A convenient way for generating such substitutional variants involves affinity maturation using phage display. Briefly, several hypervariable region sites (e. g. 6-7 sites) are mutated to generate all possible amino acid substitutions at each site. The antibody variants thus generated are displayed in a monovalent fashion from filamentous phage particles as fusions to the gene III product of M13 packaged within each particle. The phage-displayed variants are then screened for their biological activity (e. g. binding affinity) as herein disclosed. In order to identify candidate hypervariable region sites for modification, alanine scanning mutagenesis can be performed to identify hypervariable region residues contributing significantly to antigen binding. Alternatively, or additionally, it may be beneficial to analyze a crystal structure of the antigen-antibody complex to identify contact points between the binding domain and, e.g., human CD70. Such contact residues and neighbouring residues are candidates for substitution according to the techniques elaborated herein. Once such variants are generated, the panel of variants is subjected to screening as described herein and antibodies with superior properties in one or more relevant assays may be selected for further development.

[0029] The monoclonal antibodies and antibody constructs of the present invention specifically include “chimeric” antibodies (immunoglobulins) in which a portion of the heavy and/or light chain is identical with or homologous to corresponding sequences in antibodies derived from a particular species or belonging to a particular antibody class or subclass, while the remainder of the chain(s) is/are identical with or homologous to corresponding sequences in antibodies derived from another species or belonging to another antibody class or subclass, as well as fragments of such antibodies, so long as they exhibit the desired biological activity (U.S. Pat. No. 4,816,567; Morrison et al., Proc. Natl. Acad. Sci. USA, 81: 6851-6855 (1984)). Chimeric antibodies of interest herein include “primitized” antibodies comprising variable domain antigen-binding sequences derived from a non-human primate (e.g., Old World Monkey, Ape etc.) and human constant region sequences. A variety of approaches for making chimeric antibodies have been described. See e.g., Morrison et al., Proc. Natl. Acad. ScL U.S.A. 81:6851, 1985; Takeda et al., Nature 314:452, 1985, Cabilly et al., U.S. Pat. No. 4,816,567; Boss et al., U.S. Pat. No. 4,816,397; Tanaguchi et al., EP 0171496; EP 0173494; and GB 2177096.

[0030] An antibody, antibody construct, antibody fragment or antibody variant may also be modified by specific deletion of human T cell epitopes (a method called “deimmunization”) by the methods disclosed for example in WO 98/52976 or WO 00/34317. Briefly, the heavy and light chain variable domains of an antibody can be analyzed for peptides that bind to MHC class II; these peptides represent potential T cell epitopes (as defined in WO 98/52976 and WO 00/34317). For detection of potential T cell epitopes, a computer modeling approach termed “peptide threading” can be applied, and in addition a database of human MHC class II binding peptides can be searched for motifs present in the VH and VL sequences, as described in WO 98/52976 and WO 00/34317. These motifs bind to any of the 18 major MHC class II DR allotypes, and thus constitute potential T cell epitopes. Potential T cell epitopes detected can be eliminated by substituting small numbers of amino acid residues in the variable domains, or preferably, by single amino acid substitutions. Typically, conservative substitutions are made. Often, but not exclusively, an amino acid common to a position in human germline antibody sequences may be used. Human germline sequences are disclosed e.g. in Tomlinson, et al. (1992) J. Mol. Biol. 227:776-798; Cook, G. P. et al. (1995) Immunol. Today Vol. 16 (5): 237-242; and Tomlinson et al. (1995) EMBO J. 14: 14:4628-4638. The V BASE directory provides a comprehensive directory of human immunoglobulin variable region sequences (compiled by Tomlinson, L A. et al. MRC Centre for Protein Engineering, Cambridge, UK). These sequences can be used as a source of human sequence, e.g., for framework regions and CDRs. Consensus human framework regions can also be used, for example as described in U.S. Pat. No. 6,300,064.

[0031] “Humanized” antibodies, antibody constructs, variants or fragments thereof (such as Fv, Fab, Fab′, F(ab′)2 or other antigen-binding subsequences of antibodies) are antibodies or immunoglobulins of mostly human sequences, which contain (a) minimal sequence(s) derived from non-human immunoglobulin. For the most part, humanized antibodies are human immunoglobulins (recipient antibody) in which residues from a hypervariable region (also CDR) of the recipient are replaced by residues from a hypervariable region of a non-human (e.g., rodent) species (donor antibody) such as mouse, rat, hamster or rabbit having the desired specificity, affinity, and capacity. In some instances, Fv framework region (FR) residues of the human immunoglobulin are replaced by corresponding non-human residues. Furthermore, “humanized antibodies” as used herein may also comprise residues which are found neither in the recipient antibody nor the donor antibody. These modifications are made to further refine and optimize antibody performance. The humanized antibody may also comprise at least a portion of an immunoglobulin constant region (Fc), typically that of a human immunoglobulin. For further details, see Jones et al., Nature, 321: 522-525 (1986); Reichmann et al., Nature, 332: 323-329 (1988); and Presta, Curr. Op. Struct. Biol., 2: 593-596 (1992).

[0032] Humanized antibodies or fragments thereof can be generated by replacing sequences of the Fv variable domain that are not directly involved in antigen binding with equivalent sequences from human Fv variable domains. Exemplary methods for generating humanized antibodies or fragments thereof are provided by Morrison (1985) Science 229:1202-1207; by Oi et al. (1986) BioTechniques 4:214; and by U.S. Pat. No. 5,585,089; U.S. Pat. No. 5,693,761; U.S. Pat. No. 5,693,762; U.S. Pat. No. 5,859,205; and U.S. Pat. No. 6,407,213. Those methods include isolating, manipulating, and expressing the nucleic acid sequences that encode all or part of immunoglobulin Fv variable domains from at least one of a heavy or light chain. Such nucleic acids may be obtained from a hybridoma producing an antibody against a predetermined target, as described above, as well as from other sources. The recombinant DNA encoding the humanized antibody molecule can then be cloned into an appropriate expression vector.

[0033] Humanized antibodies may also be produced using transgenic animals such as mice that express human heavy and light chain genes, but are incapable of expressing the endogenous mouse immunoglobulin heavy and light chain genes. Winter describes an exemplary CDR grafting method that may be used to prepare the humanized antibodies described herein (U.S. Pat. No. 5,225,539). All of the CDRs of a particular human antibody may be replaced with at least a portion of a non-human CDR, or only some of the CDRs may be replaced with non-human CDRs. It is only necessary to replace the number of CDRs required for binding of the humanized antibody to a predetermined antigen.

[0034] A humanized antibody can be optimized by the introduction of conservative substitutions, consensus sequence substitutions, germline substitutions and/or back mutations. Such altered immunoglobulin molecules can be made by any of several techniques known in the art, (e.g., Teng et al., Proc. Natl. Acad. Sci. U.S.A., 80: 7308-7312, 1983; Kozbor et al., Immunology Today, 4: 7279, 1983; Olsson et al., Meth. Enzymol., 92: 3-16, 1982, and EP 239 400).

[0035] The term “human antibody”, “human antibody construct” and “human binding domain” includes antibodies, antibody constructs and binding domains having antibody regions such as variable and constant regions or domains which correspond substantially to human germline immunoglobulin sequences known in the art, including, for example, those described by Kabat et al. (1991) (loc. cit.). The human antibodies, antibody constructs or binding domains of the invention may include amino acid residues not encoded by human germline immunoglobulin sequences (e.g., mutations introduced by random or site-specific mutagenesis in vitro or by somatic mutation in vivo), for example in the CDRs, and in particular, in CDR3. The human antibodies, antibody constructs or binding domains can have at least one, two, three, four, five, or more positions replaced with an amino acid residue that is not encoded by the human germline immunoglobulin sequence. The definition of human antibodies, antibody constructs and binding domains as used herein also contemplates fully human antibodies, which include only non-artificially and/or genetically altered human sequences of antibodies as those can be derived by using technologies or systems such as the Xenomouse.

[0036] In some embodiments, the antibody constructs of the invention are “isolated” or “substantially pure” antibody constructs. “Isolated” or “substantially pure”, when used to describe the antibody constructs disclosed herein, means an antibody construct that has been identified, separated and/or recovered from a component of its production environment. Preferably, the antibody construct is free or substantially free of association with all other components from its production environment. Contaminant components of its production environment, such as that resulting from recombinant transfected cells, are materials that would typically interfere with diagnostic or therapeutic uses for the polypeptide, and may include enzymes, hormones, and other proteinaceous or non-proteinaceous solutes. The antibody constructs may e.g constitute at least about 5%, or at least about 50% by weight of the total protein in a given sample. It is understood that the isolated protein may constitute from 5% to 99.9% by weight of the total protein content, depending on the circumstances. The polypeptide may be made at a significantly higher concentration through the use of an inducible promoter or high expression promoter, such that it is made at increased concentration levels. The definition includes the production of an antibody construct in a wide variety of organisms and/or host cells that are known in the art. In preferred embodiments, the antibody construct will be purified (1) to a degree sufficient to obtain at least 15 residues of N-terminal or internal amino acid sequence by use of a spinning cup sequenator, or (2) to homogeneity by SDS-PAGE under non-reducing or reducing conditions using Coomassie blue or, preferably, silver stain. Ordinarily, however, an isolated antibody construct will be prepared by at least one purification step.

[0037] The term “binding domain” characterizes in connection with the present invention a domain which (specifically) binds to/interacts with/recognizes a given target epitope or a given target site on the target molecules (antigens), here: CD70 and CD3, respectively. The structure and function of the first binding domain (recognizing CD70), and preferably also the structure and/or function of the second binding domain (recognizing CD3), is/are based on the structure and/or function of an antibody, e.g. of a full-length or whole immunoglobulin molecule. According to the invention, the first binding domain is characterized by the presence of three light chain CDRs (i.e. CDR1, CDR2 and CDR3 of the VL region) and/or three heavy chain CDRs (i.e. CDR1, CDR2 and CDR3 of the VH region). The second binding domain preferably also comprises the minimum structural requirements of an antibody which allow for the target binding. More preferably, the second binding domain comprises at least three light chain CDRs (i.e. CDR1, CDR2 and CDR3 of the VL region) and/or three heavy chain CDRs (i.e. CDR1, CDR2 and CDR3 of the VH region). It is envisaged that the first and/or second binding domain is produced by or obtainable by phage-display or library screening methods rather than by grafting CDR sequences from a pre-existing (monoclonal) antibody into a scaffold.

[0038] According to the present invention, binding domains are in the form of one or more polypeptides. Such polypeptides may include proteinaceous parts and non-proteinaceous parts (e.g. chemical linkers or chemical cross-linking agents such as glutaraldehyde). Proteins (including fragments thereof, preferably biologically active fragments, and peptides, usually having less than 30 amino acids) comprise two or more amino acids coupled to each other via a covalent peptide bond (resulting in a chain of amino acids). The term “polypeptide” as used herein describes a group of molecules, which usually consist of more than 30 amino acids. Polypeptides may further form multimers such as dimers, trimers and higher oligomers, i.e., consisting of more than one polypeptide molecule. Polypeptide molecules forming such dimers, trimers etc. may be identical or non-identical. The corresponding higher order structures of such multimers are, consequently, termed homo- or heterodimers, homo- or heterotrimers etc. An example for a hereteromultimer is an antibody molecule, which, in its naturally occurring form, consists of two identical light polypeptide chains and two identical heavy polypeptide chains. The terms “peptide”, “polypeptide” and “protein” also refer to naturally modified peptides/polypeptides/proteins wherein the modification is effected e.g. by post-translational modifications like glycosylation, acetylation, phosphorylation and the like. A “peptide”, “polypeptide” or “protein” when referred to herein may also be chemically modified such as pegylated. Such modifications are well known in the art and described herein below.

[0039] Preferably the binding domain which binds to CD70 and/or the binding domain which binds to CD3 is/are human binding domains. Antibodies and antibody constructs comprising at least one human binding domain avoid some of the problems associated with antibodies or antibody constructs that possess non-human such as rodent (e.g. murine, rat, hamster or rabbit) variable and/or constant regions. The presence of such rodent derived proteins can lead to the rapid clearance of the antibodies or antibody constructs or can lead to the generation of an immune response against the antibody or antibody construct by a patient. In order to avoid the use of rodent derived antibodies or antibody constructs, human or fully human antibodies/antibody constructs can be generated through the introduction of human antibody function into a rodent so that the rodent produces fully human antibodies.

[0040] The ability to clone and reconstruct megabase-sized human loci in YACs and to introduce them into the mouse germline provides a powerful approach to elucidating the functional components of very large or crudely mapped loci as well as generating useful models of human disease. Furthermore, the use of such technology for substitution of mouse loci with their human equivalents could provide unique insights into the expression and regulation of human gene products during development, their communication with other systems, and their involvement in disease induction and progression.

[0041] An important practical application of such a strategy is the “humanization” of the mouse humoral immune system. Introduction of human immunoglobulin (Ig) loci into mice in which the endogenous Ig genes have been inactivated offers the opportunity to study the mechanisms underlying programmed expression and assembly of antibodies as well as their role in B-cell development. Furthermore, such a strategy could provide an ideal source for production of fully human monoclonal antibodies (mAbs)—an important milestone towards fulfilling the promise of antibody therapy in human disease. Fully human antibodies or antibody constructs are expected to minimize the immunogenic and allergic responses intrinsic to mouse or mouse-derivatized mAbs and thus to increase the efficacy and safety of the administered antibodies/antibody constructs. The use of fully human antibodies or antibody constructs can be expected to provide a substantial advantage in the treatment of chronic and recurring human diseases, such as inflammation, autoimmunity, and cancer, which require repeated compound administrations.

[0042] One approach towards this goal was to engineer mouse strains deficient in mouse antibody production with large fragments of the human Ig loci in anticipation that such mice would produce a large repertoire of human antibodies in the absence of mouse antibodies. Large human Ig fragments would preserve the large variable gene diversity as well as the proper regulation of antibody production and expression. By exploiting the mouse machinery for antibody diversification and selection and the lack of immunological tolerance to human proteins, the reproduced human antibody repertoire in these mouse strains should yield high affinity antibodies against any antigen of interest, including human antigens. Using the hybridoma technology, antigen-specific human mAbs with the desired specificity could be readily produced and selected. This general strategy was demonstrated in connection with the generation of the first XenoMouse mouse strains (see Green et al. Nature Genetics 7:13-21 (1994)). The XenoMouse strains were engineered with yeast artificial chromosomes (YACs) containing 245 kb and 190 kb-sized germline configuration fragments of the human heavy chain locus and kappa light chain locus, respectively, which contained core variable and constant region sequences. The human Ig containing YACs proved to be compatible with the mouse system for both rearrangement and expression of antibodies and were capable of substituting for the inactivated mouse Ig genes. This was demonstrated by their ability to induce B cell development, to produce an adult-like human repertoire of fully human antibodies, and to generate antigen-specific human mAbs. These results also suggested that introduction of larger portions of the human Ig loci containing greater numbers of V genes, additional regulatory elements, and human Ig constant regions might recapitulate substantially the full repertoire that is characteristic of the human humoral response to infection and immunization. The work of Green et al. was recently extended to the introduction of greater than approximately 80% of the human antibody repertoire through introduction of megabase sized, germline configuration YAC fragments of the human heavy chain loci and kappa light chain loci, respectively. See Mendez et al. Nature Genetics 15:146-156 (1997) and U.S. patent application Ser. No. 08/759,620.

[0043] The production of the XenoMouse mice is further discussed and delineated in U.S. patent application Ser. No. 07/466,008, Ser. No. 07/610,515, Ser. No. 07/919,297, Ser. No. 07/922,649, Ser. No. 08/031,801, Ser. No. 08/112,848, Ser. No. 08/234,145, Ser. No. 08/376,279, Ser. No. 08/430,938, Ser. No. 08/464,584, Ser. No. 08/464,582, Ser. No. 08/463,191, Ser. No. 08/462,837, Ser. No. 08/486,853, Ser. No. 08/486,857, Ser. No. 08/486,859, Ser. No. 08/462,513, Ser. No. 08/724,752, and Ser. No. 08/759,620; and U.S. Pat. Nos. 6,162,963; 6,150,584; 6,114,598; 6,075,181, and 5,939,598 and Japanese Patent Nos. 3 068 180 B2, 3 068 506 B2, and 3 068 507 B2. See also Mendez et al. Nature Genetics 15:146-156 (1997) and Green and Jakobovits J. Exp. Med. 188:483-495 (1998), EP 0 463 151 B1, WO 94/02602, WO 96/34096, WO 98/24893, WO 00/76310, and WO 03/47336.

[0044] In an alternative approach, others, including GenPharm International, Inc., have utilized a “minilocus” approach. In the minilocus approach, an exogenous Ig locus is mimicked through the inclusion of pieces (individual genes) from the Ig locus. Thus, one or more VH genes, one or more DH genes, one or more JH genes, a mu constant region, and a second constant region (preferably a gamma constant region) are formed into a construct for insertion into an animal. This approach is described in U.S. Pat. No. 5,545,807 to Surani et al. and U.S. Pat. Nos. 5,545,806; 5,625,825; 5,625,126; 5,633,425; 5,661,016; 5,770,429; 5,789,650; 5,814,318; 5,877,397; 5,874,299; and 6,255,458 each to Lonberg and Kay, U.S. Pat. Nos. 5,591,669 and 6,023,010 to Krimpenfort and Berns, U.S. Pat. Nos. 5,612,205; 5,721,367; and U.S. Pat. No. 5,789,215 to Berns et al., and U.S. Pat. No. 5,643,763 to Choi and Dunn, and GenPharm International U.S. patent application Ser. No. 07/574,748, Ser. No. 07/575,962, Ser. No. 07/810,279, Ser. No. 07/853,408, Ser. No. 07/904,068, Ser. No. 07/990,860, Ser. No. 08/053,131, Ser. No. 08/096,762, Ser. No. 08/155,301, Ser. No. 08/161,739, Ser. No. 08/165,699, Ser. No. 08/209,741. See also EP 0 546 073 B1, WO 92/03918, WO 92/22645, WO 92/22647, WO 92/22670, WO 93/12227, WO 94/00569, WO 94/25585, WO 96/14436, WO 97/13852, and WO 98/24884 and U.S. Pat. No. 5,981,175. See further Taylor et al. (1992), Chen et al. (1993), Tuaillon et al. (1993), Choi et al. (1993), Lonberg et al. (1994), Taylor et al. (1994), and Tuaillon et al. (1995), Fishwild et al. (1996).

[0045] Kirin has also demonstrated the generation of human antibodies from mice in which, through microcell fusion, large pieces of chromosomes, or entire chromosomes, have been introduced. See European Patent Application Nos. 773 288 and 843 961. Xenerex Biosciences is developing a technology for the potential generation of human antibodies. In this technology, SCID mice are reconstituted with human lymphatic cells, e.g., B and/or T cells. Mice are then immunized with an antigen and can generate an immune response against the antigen. See U.S. Pat. Nos. 5,476,996; 5,698,767; and 5,958,765.

[0046] Human anti-mouse antibody (HAMA) responses have led the industry to prepare chimeric or otherwise humanized antibodies. It is however expected that certain human anti-chimeric antibody (HACA) responses will be observed, particularly in chronic or multi-dose utilizations of the antibody. Thus, it would be desirable to provide antibody constructs comprising a human binding domain against CD70 and/or a human binding domain against CD3 in order to vitiate concerns and/or effects of HAMA or HACA response.

[0047] The CD70 binding domains of the bispecific antibody constructs that were generated in the context of the present invention were characterized for their epitope specificity, as described in Example 2. The binders were classified into different groups (I, II, III, IIIv, V, VI, VII and VIII—see Table 4), depending on the chimeric CD70 molecule for which a loss of binding was observed in the flow cytometry readout. Hence, according to a preferred embodiment, the first binding domain of the antibody construct of the invention binds to an epitope of CD70 which is comprised within the region denominated E3 (the region as depicted in SEQ ID NO: 745). As described in the following, the binding domain recognizing region E3 may recognize additional CD70 regions.

[0048] It is furthermore envisaged that the first binding domain of the antibody construct of the invention binds to an epitope of CD70 which is comprised within a combination of CD70 regions selected from the group consisting of:
[0049] a) regions E2, E3, E4 and E6,
[0050] b) regions E2, E3 and E4,
[0051] c) regions E2, E3 and E6,
[0052] d) regions E2 and E3,
[0053] e) regions E3, E4 and E6,
[0054] f) regions E3 and E4, and
[0055] g) regions E3 and E6.

[0056] The epitope recognized by the anti-CD70 binding domain may be linear or conformational. The position of the above described regions E2, E3, E4 and E6 within the human CD70 protein as well as their sequence identifyers are described in Example 1.

[0057] In a further preferred embodiment, the first binding domain of the antibody construct of the invention does not bind to an epitope comprised within the region denominated E1. It is additionally or alternatively envisaged that the first binding domain of the antibody construct of the invention does not bind to an epitope comprised within the region denominated E7.

[0058] The terms “(specifically) binds to”, (specifically) recognizes”, “is (specifically) directed to”, and “(specifically) reacts with” mean in accordance with this invention that a binding domain interacts or specifically interacts with a given epitope or a given target site on the target molecules (antigens), here: CD70 and CD3, respectively.

[0059] The term “epitope” refers to a site on an antigen to which a binding domain, an antibody or immunoglobulin, or a derivative, fragment or variant of an antibody or an immunoglobulin, specifically binds. An “epitope” is antigenic and thus the term epitope is sometimes also referred to herein as “antigenic structure” or “antigenic determinant”. Thus, the binding domain is an “antigen interaction site”. Said binding/interaction is also understood to define a “specific recognition”.

[0060] “Epitopes” can be formed both by contiguous amino acids or non-contiguous amino acids juxtaposed by tertiary folding of a protein. A “linear epitope” is an epitope where an amino acid primary sequence comprises the recognized epitope. A linear epitope typically includes at least 3 or at least 4, and more usually, at least 5 or at least 6 or at least 7, for example, about 8 to about 10 amino acids in a unique sequence.

[0061] A “conformational epitope”, in contrast to a linear epitope, is an epitope wherein the primary sequence of the amino acids comprising the epitope is not the sole defining component of the epitope recognized (e.g., an epitope wherein the primary sequence of amino acids is not necessarily recognized by the binding domain). Typically a conformational epitope comprises an increased number of amino acids relative to a linear epitope. With regard to recognition of conformational epitopes, the binding domain recognizes a three-dimensional structure of the antigen, preferably a peptide or protein or fragment thereof (in the context of the present invention, the antigenic structure for the first binding domain is comprised within the CD70 protein). For example, when a protein molecule folds to form a three-dimensional structure, certain amino acids and/or the polypeptide backbone forming the conformational epitope become juxtaposed enabling the antibody to recognize the epitope. Methods of determining the conformation of epitopes include, but are not limited to, x-ray crystallography, two-dimensional nuclear magnetic resonance (2D-NMR) spectroscopy and site-directed spin labelling and electron paramagnetic resonance (EPR) spectroscopy.

[0062] A method for epitope mapping is described in the following: When a region (a contiguous amino acid stretch) in the human CD70 protein is exchanged/replaced with its corresponding region of a non-human and non-primate CD70 antigen (e.g., mouse CD70, but others like chicken, rat, hamster, rabbit etc. might also be conceivable), a decrease in the binding of the binding domain is expected to occur, unless the binding domain is cross-reactive for the non-human, non-primate CD70 used. Said decrease is preferably at least 10%, 20%, 30%, 40%, or 50%; more preferably at least 60%, 70%, or 80%, and most preferably 90%, 95% or even 100% in comparison to the binding to the respective region in the human CD70 protein, whereby binding to the respective region in the human CD70 protein is set to be 100%. It is envisaged that the aforementioned human CD70/non-human CD70 chimeras are expressed in CHO cells. It is also envisaged that at the C-terminus of the chimeric molecules a v5 tag is fused, e.g. via a GGGGS linker. The method is described in more detail in Examples 1 and 2.

[0063] In an alternative or additional method for epitope mapping, several truncated versions of the human CD70 extracellular domain can be generated in order to determine a specific region that is recognized by a binding domain. In these truncated versions, the different extracellular CD70 domains/sub-domains or regions are stepwise deleted, starting from the C-terminus. It is envisaged that the truncated CD70 versions are expressed in CHO cells. It is also envisaged that at the C-terminus of the truncated molecules a v5 tag is fused, e.g. via a GGGGS linker, which allows verifying their correct expression on the cell surface. A decrease or a loss of binding is expected to occur with those truncated CD70 versions which do not encompass any more the CD70 region that is recognized by the binding domain. The decrease of binding is preferably at least 10%, 20%, 30%, 40%, 50%; more preferably at least 60%, 70%, 80%, and most preferably 90%, 95% or even 100%, whereby binding to the entire human CD70 protein (or its extracellular region or domain) is set to be 100%.

[0064] A further method to determine the contribution of a specific residue of a target antigen to the recognition by a antibody construct or binding domain is alanine scanning (see e.g. Morrison K L & Weiss G A. Cur Opin Chem Biol. 2001 Jun.; 5(3):302-7), where each residue to be analyzed is replaced by alanine, e.g. via site-directed mutagenesis. Alanine is used because of its non-bulky, chemically inert, methyl functional group that nevertheless mimics the secondary structure references that many of the other amino acids possess. Sometimes bulky amino acids such as valine or leucine can be used in cases where conservation of the size of mutated residues is desired. Alanine scanning is a mature technology which has been used for a long period of time.

[0065] The interaction between the binding domain and the epitope or the region comprising the epitope implies that a binding domain exhibits appreciable affinity for the epitope/the region comprising the epitope on a particular protein or antigen (here: CD70 and CD3, respectively) and, generally, does not exhibit significant reactivity with proteins or antigens other than CD70 or CD3. “Appreciable affinity” includes binding with an affinity of about 10⁻⁶ M (KD) or stronger. Preferably, binding is considered specific when the binding affinity is about 10⁻¹² to 10⁻⁹ M, 10⁻¹² to 10⁻⁹ M, 10⁻¹² to 10⁻¹⁹ M, 10⁻¹¹ to 10⁻⁹ M, preferably of about 10⁻¹¹ to 10⁻⁹ M. Whether a binding domain specifically reacts with or binds to a target can be tested readily by, inter alia, comparing the reaction of said binding domain with a target protein or antigen with the reaction of said binding domain with proteins or antigens other than CD70 or CD3. Preferably, a binding domain of the invention does not essentially or substantially bind to proteins or antigens other than CD70 or CD3 (i.e., the first binding domain is not capable of binding to proteins other than CD70 and the second binding domain is not capable of binding to proteins other than CD3).

[0066] The term “does not essentially/substantially bind” or “is not capable of binding” means that a binding domain of the present invention does not bind a protein or antigen other than CD70 or CD3, i.e., does not show reactivity of more than 30%, preferably not more than 20%, more preferably not more than 10%, particularly preferably not more than 9%, 8%, 7%, 6% or 5% with proteins or antigens other than CD70 or CD3, whereby binding to CD70 or CD3, respectively, is set to be 100%.

[0067] Specific binding is believed to be effected by specific motifs in the amino acid sequence of the binding domain and the antigen. Thus, binding is achieved as a result of their primary, secondary and/or tertiary structure as well as the result of secondary modifications of said structures. The specific interaction of the antigen-interaction-site with its specific antigen may result in a simple binding of said site to the antigen. Moreover, the specific interaction of the antigen-interaction-site with its specific antigen may alternatively or additionally result in the initiation of a signal, e.g. due to the induction of a change of the conformation of the antigen, an oligomerization of the antigen, etc.

[0068] Preferably, the first binding domain of the bispecific antibody construct of the invention comprises a VH region comprising CDR-H1, CDR-H2 and CDR-H3 and a VL region comprising CDR-L1, CDR-L2 and CDR-L3, wherein said CDR-H1, CDR-H2, CDR-H3, CDR-L1, CDR-L2 and CDR-L3 are selected from the group consisting of those depicted in:
[0069] 1) SEQ ID NOs: 1-6;
[0070] 2) SEQ: ID NOs: 11-16;
[0071] 3) SEQ: ID NOs: 21-26;
[0072] 4) SEQ: ID NOs: 31-36;
[0073] 5) SEQ: ID NOs: 41-46;
[0074] 6) SEQ: ID NOs: 51-56;
[0075] 7) SEQ: ID NOs: 61-66;
[0076] 8) SEQ: ID NOs: 71-76;
[0077] 9) SEQ: ID NOs: 81-86;
[0078] 10) SEQ: ID NOs: 91-96;
[0079] 11) SEQ: ID NOs: 101-106;
[0080] 12) SEQ: ID NOs: 111-116;
[0081] 13) SEQ: ID NOs: 121-126;
[0082] 14) SEQ: ID NOs: 131-136;
[0083] 15) SEQ: ID NOs: 141-146;
[0084] 16) SEQ: ID NOs: 151-156;
[0085] 17) SEQ: ID NOs: 161-166;
[0086] 18) SEQ: ID NOs: 171-176;
[0087] 19) SEQ: ID NOs: 181-186;
[0088] 20) SEQ: ID NOs: 191-196;
[0089] 21) SEQ: ID NOs: 201-206;
[0090] 22) SEQ: ID NOs: 211-216;
[0091] 23) SEQ: ID NOs: 221-226;
[0092] 24) SEQ: ID NOs: 231-236;
[0093] 25) SEQ: ID NOs: 241-246;
[0094] 26) SEQ: ID NOs: 251-256;
[0095] 27) SEQ: ID NOs: 261-266;
[0096] 28) SEQ: ID NOs: 271-276;
[0097] 29) SEQ: ID NOs: 281-286;
[0098] 30) SEQ: ID NOs: 291-296;
[0099] 31) SEQ: ID NOs: 301-306;
[0100] 32) SEQ: ID NOs: 311-316;
[0101] 33) SEQ: ID NOs: 321-326;
[0102] 34) SEQ: ID NOs: 331-336;
[0103] 35) SEQ: ID NOs: 341-346;
[0104] 36) SEQ: ID NOs: 351-356;
[0105] 37) SEQ: ID NOs: 361-366;
[0106] 38) SEQ: ID NOs: 371-376;
[0107] 39) SEQ: ID NOs: 381-386;
[0108] 40) SEQ: ID NOs: 391-396;
[0109] 41) SEQ: ID NOs: 401-406;
[0110] 42) SEQ: ID NOs: 411-416;
[0111] 43) SEQ: ID NOs: 421-426;
[0112] 44) SEQ: ID NOs: 431-436;
[0113] 45) SEQ: ID NOs: 441-446;
[0114] 46) SEQ: ID NOs: 451-456;
[0115] 47) SEQ: ID NOs: 461-466;
[0116] 48) SEQ: ID NOs: 471-476;
[0117] 49) SEQ: ID NOs: 481-486;
[0118] 50) SEQ: ID NOs: 491-496;
[0119] 51) SEQ: ID NOs: 501-506;
[0120] 52) SEQ: ID NOs: 511-516;
[0121] 53) SEQ: ID NOs: 521-526;
[0122] 54) SEQ: ID NOs: 531-536;
[0123] 55) SEQ: ID NOs: 541-546;
[0124] 56) SEQ: ID NOs: 551-556;
[0125] 57) SEQ: ID NOs: 561-566;
[0126] 56) SEQ: ID NOs: 571-576;
[0127] 59) SEQ: ID NOs: 561-586;
[0128] 60) SEQ: ID NOs: 591-596;
[0129] 61) SEQ: ID NOs: 601-606;
[0130] 62) SEQ: ID NOs: 611-616;
[0131] 63) SEQ: ID NOs: 621-626;
[0132] 64) SEQ: ID NOs: 631-636;
[0133] 65) SEQ: ID NOs: 641-646;
[0134] 66) SEQ: ID NOs: 651-656;
[0135] 67) SEQ: ID NOs: 661-666;
[0136] 68) SEQ: ID NOs: 671-676;
[0137] 69) SEQ: ID NOs: 681-686;
[0138] 70) SEQ: ID NOs: 691-696;
[0139] 71) SEQ: ID NOs: 701-706;
[0140] 72) SEQ: ID NOs: 711-716;
[0141] 73) SEQ: ID NOs: 721-726;
[0142] 74) SEQ: ID NOs: 731-736;
[0143] 75) SEQ: ID NOs: 1044-1049;
[0144] 76) SEQ: ID NOs: 1058-1063;
[0145] 77) SEQ: ID NOs: 1072-1077;
[0146] 78) SEQ: ID NOs: 1086-1091;
[0147] 79) SEQ: ID NOs: 1100-1005;
[0148] 80) SEQ: ID NOs: 1114-1119;
[0149] 81)SEQ: ID NOs: 1128-1133;
[0150] 82) SEQ: ID NOs: 1142-1147;
[0151] 63) SEQ: ID NOs: 1156-1161;
[0152] 84) SEQ: ID NOs: 1170-1175;
[0153] 65) SEQ: ID NOs: 1184-1189;
[0154] 86) SEQ: ID NOs: 1198-1203;
[0155] 87) SEQ: ID NOs: 1212-1217;
[0156] 88) SEQ: ID NOs: 1226-1231;
[0157] 89) SEQ: ID NOs: 1240-1245;
[0158] 90) SEQ: ID NOs: 1254-1250;
[0159] 91) SEQ: ID NOs: 1268-1273;
[0160] 92) SEQ: ID NOs: 1282-1287;
[0161] 93) SEQ: ID NOs: 1296-1301;
[0162] 94) SEQ: ID NOs: 1310-1315;
[0163] 95) SEQ: ID NOs: 1324-1329;
[0164] 96) SEQ: ID NOs: 1338-1343;
[0165] 97) SEQ: ID NOs: 1352-1357;
[0166] 98) SEQ: ID NOs: 136-1371;
[0167] 99) SEQ: ID NOs: 1380-1385;
[0168] 100) SEQ: ID NOs: 1394-1399;
[0169] 101) SEQ: ID NOs: 1408-1413;
[0170] 102) SEQ: ID NOs: 1422-1427;
[0171] 103) SEQ: ID NOs: 1436-1441;
[0172] 104) SEQ: ID NOs: 1450-1455;
[0173] 105) SEQ: ID NOs: 1464-1469;
[0174] 106) SEQ: ID NOs: 1478-1483;
[0175] 107) SEQ: ID NOs: 1492-1497;
[0176] 108) SEQ: ID NOs: 1506-1511;
[0177] 109) SEQ: ID NOs: 1520-1525;
[0178] 110) SEQ: ID NOs: 1534-1539;
[0179] 111) SEQ: ID NOs: 1548-1553; and
[0180] 112) SEQ: ID NOs: 1562-1567.

[0181] Of the above defined antibody constructs, the following were found to have particularly beneficial characteristics, as determined in Examples 3-16: The bispecific antibody constructs comprising a first binding domain which binds to human CD70 on the surface of a target cell and a second binding domain which binds to human CD3 on the surface of a T cell, wherein the first binding domain comprises a VH region comprising CDR-H1, CDR-H2 and CDR-H3 and a VL region comprising CDR-L1, CDR-L2 and CDR-L3, wherein said CDR-H1, CDR-H2, CDR-H3, CDR-L1, CDR-L2 and CDR-L3 are selected from the group consisting of those depicted in:
[0182] 1) SEQ: ID NOs: 1044-1049;
[0183] 2) SEQ: ID NOs: 1086-1091;
[0184] 3) SEQ: ID NOs: 1142-1147;
[0185] 4) SEQ: ID NOs: 1170-1175;
[0186] 5) SEQ: ID NOs: 1184-1189;
[0187] 6) SEQ: ID NOs: 1212-1217;
[0188] 7) SEQ: ID NOs: 1226-1231;
[0189] 8) SEQ: ID NOs: 1240-1245;
[0190] 9) SEQ: ID NOs: 1254-1259;
[0191] 10) SEQ: ID NOs: 1268-1273;
[0192] 11) SEQ: ID NOs: 1338-1343;
[0193] 12) SEQ: ID NOs: 1352-1357;
[0194] 13) SEQ: ID NOs: 1366-1371;
[0195] 14) SEQ: ID NOs: 1422-1427; and
[0196] 15) SEQ: ID NOs: 1436-1441.

[0197] These constructs are characterized e.g. by a particularly high affinity, high cytotoxic activity (low EC50 values), and beneficial interspecies affinity gap, as well as a high sequence identity of the VH and VL sequences to the human germline, low monomer to dimer conversion, high thermostability, high plasma stability, low turbidity, high protein homogeneity, and a beneficial monomer/dimer potency gap. In this context, it should be noted that these CDR amino acid sequences have a considerably high sequence similarity, which is outlined in the following Tables 1 and 2.

TABLE 1
VH-CDR sequences of a selection of CD70 binders

| | VH-CDR1 | VH-CDR2 | VH-CDR3 | SEQ ID NOs |
|---|---|---|---|---|
| CD70-13D_CC | SYAMS | VISGSGGRPNYAESVKG | VDYSNYLFFDY | 1044-1046 |
| CD70-16D_CC | SYAMS | AISGSGGRTFYAESVEG | HDYSNYPYFDY | 1086-1088 |
| CD70-21D_CC | TYAMS | AISGSGGRTFYAESVEG | HDYSNYPYFDY | 1142-1144 |
| CD70-24D_CC | SYAMS | AISGSGGSTFYAESVKG | HDYSNYPYFDY | 1170-1172 |
| CD70-25D_CC | SYAMS | AISGSGGRTFYAESVEG | HDYSNYPYFDY | 1184-1186 |
| CD70_1-G2D_CC | SYAMS | AISGSGGSTFYAESVQG | HDYSNYPYFDY | 1212-1214 |
| CD70-27D_CC | TYAMS | AISGSGGGTFYAESVKG | HDYSNYPYFDY | 1226-1228 |
| CD70-28D_CC | TYAMS | LISGSGGRTYYAESVKG | HDYSNYPYFDY | 1240-1242 |
| CD70-31D_CC | SYAMS | AISGSGGRAQYAESVQG | HDYSNYPYFDY | 1254-1256 |
| CD70-32D_CC | SYAMS | AISGSGGRTFYAESVEG | HDYSNYPYFDY | 1268-1270 |
| CD70-42D_CC | TYAMS | LISGSGGRTYYAESVKG | HDYSNYPYFDY | 1338-1340 |
| CD70-43D_CC | SYAMS | AISGSGGRTFYAESVEG | HDYSNYPYFDY | 1352-1354 |
| CD70-48D_CC | SYAMS | VISGSGGITDFAESVKG | HDYSNYFFFDY | 1366-1368 |
| CD70-62D_CC | SYSMN | YISSSGGYIYYAESVKG | GDYSNYAYFDY | 1422-1424 |
| CD70-13D_CC | VYAMS | TISGSGGSTFYAESVKG | HDYSNYAYFDY | 1436-1438 |

TABLE 2
VL-CDR sequences of a selection of CD70 binders

| | VL-CDR1 | VL-CDR2 | VL-CDR3 | SEQ ID NOs |
|---|---|---|---|---|
| CD70-13D_CC | RAGQSVRSSYLG | GASSRAT | QQYGYSPPT | 1047-1049 |
| CD70-16D_CC | RASQSIRSSYLA | GASSRAT | QQYGDLPFT | 1089-1091 |
| CD70-21D_CC | RASQSVRSTYLA | GASSRAT | QQYGDLPFT | 1145-1147 |
| CD70-24D_CC | RASQSVRSSYLA | GASSRAT | QQYGDLPFT | 1173-1175 |
| CD70-25D_CC | RASQSVRSNYLA | GASSRAT | QQYGDLPFT | 1187-1189 |
| CD70-1-G2D_CC | RASQSVRGNYLA | GASSRAT | QQYGYSPFT | 1215-1217 |
| CD70-27D_CC | RASQSIRSNYLA | GASSRAT | QQYGSSPFT | 1229-1231 |
| 0D70-28D_CC | RASQSVRSNYLA | GASNRAT | QQYGISPPT | 1243-1245 |
| CD70-31D_CC | RASQSVSSN-LA | GSSSRAT | QQYGSSPPP | 1257-1259 |
| CD70-32D_CC | RASQGVRSDYLA | GASSRAT | QQYGSTPPT | 1271-1273 |
| CD70-42D_CC | RASQGVRSSYLA | GASSRAT | QQYGSSPPT | 1341-1343 |
| CD70-43D_CC | RASQSVRSNYLA | GASSRAT | QQYGSSPPT | 1355-1357 |
| CD70-48D_CC | RASQGI-SNYLA | AASILQS | QQYFAYPIT | 1369-1371 |
| CD70-62D_CC | RASQGI-SNYLA | AASTLQS | QQYYSTPLT | 1425-1427 |
| CD70-13D_CC | RASQSVRSSYLA | GASSRAT | QQYGDLPFT | 1439-1441 |

[0198] This remarkable sequence similarity in the context of the common biological/biochemical characteristics of the antibody constructs allows for drafting a consensus sequence for the six VH and VL CDRs. These consensus sequences are identified in the following. Therefore, it is an object of the present invention to provide a bispecific antibody construct comprising a first binding domain which binds to human CD70 on the surface of a target cell and a second binding domain which binds to human CD3 on the surface of a T cell (and in one embodiment at least to macaque CD3), wherein the first binding domain comprises a VH region comprising CDR-H1, CDR-H2 and CDR-H3 and a VL region comprising CDR-L1, CDR-L2 and CDR-L3, wherein
[0199] said CDR-H1 has the amino acid sequence X₁YX₂MX₃ (SEQ ID NO: 1869), wherein X₁ is S, T or V, X₂ is A or S, and X₃ is S or N;
[0200] said CDR-H2 has the amino acid sequence X₁ISX₂SGGX₃X₄X₅X₆AESVX₇G (SEQ ID NO: 1870), wherein X₁ is A, Y, V, L, or T, X₂ is G or S, X₃ is R, Y, S, G or I, X₄ is T, I, P, or A, X₅ is F, Y, N, Q or D, X₆ is Y or F, and X₇ is E, K or Q;
[0201] said CDR-H3 has the amino acid sequence X₁DYSNYX₂X₃FDY (SEQ ID NO: 1871), wherein X₁ is H, G or V, X₂ is P, A, L or F, and X₃ is Y or F;
[0202] said CDR-L1 has the amino acid sequence RAX₁QX₂X₃X₄X₅X₆X₇LX₈ (SEQ ID NO: 1872), wherein X₁ is S or G, X₂ is S or G, X₃ is I or V, X₄ is R, S or no amino acid, X₅ is S or G, X₆ is S, N, T or D, X₇ is Y or no amino acid, and X₅ is A or G;
[0203] said CDR-L2 has the amino acid sequence X₁X₂SX₃X₄X₅X₆ (SEQ ID NO: 1873), wherein X₁ is G or A, X₂ is A or S, X₃ is S, T, N or I, X₄ is R or L, X₅ is A or Q, and X₆ is T or S; and
[0204] said CDR-L3 has the amino acid sequence QQYX₁X₂X₃PX₄X₅ (SEQ ID NO: 1874), wherein X₁ is G, Y or F, X₂ is D, S, Y, I or A, X₃ is L, T, S or Y, X₄ is F, L, P or I, and X₅ is T or P.

[0205] It is furthermore envisaged that:
[0206] said CDR-H1 has the amino acid sequence SYSMN (SEQ ID NO: 1422) or X₁YAMS (SEQ ID NO: 1875), wherein X₁ is S, T or V;
[0207] said CDR-H2 has an amino acid sequence selected from the group consisting of YISSSGGYIYYAESVKG (SEQ ID NO: 1423), VISGSGGITDFAESVKG (SEQ ID NO: 1367) and X₁ISGSGGX₂X₃X₄YAESVX₅G (SEQ ID NO: 1876), wherein X₁ is A, V, L or T, X₂ is R, S, or G, X₃ is T, P or A, X₄ is F, N, Y or Q, and X₅ is E, K, or Q;
[0208] said CDR-H3 has an amino acid sequence selected from the group consisting of GDYSNYAYFDY (SEQ ID NO: 1424), HDYSNYFFFDY (SEQ ID NO: 1368), and X₁DYSNYX₂X₃FDY (SEQ ID NO: 1877), wherein X₁ is H or V, X₂ is P, L or A, and X₃ is Y or F;
[0209] said CDR-L1 has the amino acid sequence RASQGISNYLA (SEQ ID NO: 1425) or RAX₁QX₂X₃X₄X₅X₆YLX₇ (SEQ ID NO: 1878), wherein X₁ is S or G, X₂ is S or G, X₃ is I or V, X₄ is R or S, X₅ is S or G, X₆ is S, T, N or D, and X₇ is A or G;
[0210] said CDR-L2 has the amino acid sequence AASXLQS (SEQ ID NO: 1879), wherein X is T or I, or GX₁SX₂RAT (SEQ ID NO: 1880), wherein X₁ is A or S, and X₂ is S or N; and
[0211] said CDR-L3 has an amino acid sequence selected from the group consisting of QQYYSTPLT (SEQ ID NO: 1427), QQYFAYPIT (SEQ ID NO: 1371) and QQYGX₁X₂PX₃X₄ (SEQ ID NO: 1881), wherein X₁ is D, Y, S or I, X₂ is L, S or T, X₃ is F or P, and X₄ is T or P.

[0212] It is furthermore envisaged that:
[0213] said CDR-H1 has the amino acid sequence X₁YAMS (SEQ ID NO: 1875), wherein X₁ is S, T or V;
[0214] said CDR-H2 has the amino acid sequence X₁ISGSGGX₂X₃X₄YAESVX₅G (SEQ ID NO: 1876), wherein X₁ is A, V, L or T, X₂ is R, S, or G, X₃ is T, P or A, X₄ is F, N, Y or Q, and X₅ is E, K, or Q;
[0215] said CDR-H3 has the amino acid sequence X₁DYSNYX₂X₃FDY (SEQ ID NO: 1877), wherein X₁ is H or V, X₂ is P, L or A, and X₃ is Y or F;
[0216] said CDR-L1 has the amino acid sequence RAX₁QX₂X₃X₄X₅X₆YLX₇ (SEQ ID NO: 1878), wherein X₁ is S or G, X₂ is S or G, X₃ is I or V, X₄ is R or S, X₅ is S or G, X₆ is S, T, N or D, and X₇ is A or G;
[0217] said CDR-L2 has the amino acid sequence GX₁SX₂RAT (SEQ ID NO: 1880), wherein X₁ is A or S, and X₂ is S or N; and
[0218] said CDR-L3 has the amino acid sequence QQYGX₁X₂PX₃X₄ (SEQ ID NO: 1881), wherein X₁ is D, Y, S or I, X₂ is L, S or T, X₃ is F or P, and X₄ is T or P.

[0219] It is furthermore envisaged that:
[0220] said CDR-H1 has an amino acid sequence selected from the group consisting of SYAMS (SEQ ID NO: 1044), TYAMS (SEQ ID NO: 1142), VYAMS (SEQ ID NO: 1436) and SYSMN (SEQ ID NO: 1422);
[0221] said CDR-H2 has an amino acid sequence selected from the group consisting of AISGSGGRTFYAESVEG (SEQ ID NO: 1087), VISGSGGRPNYAESVKG (SEQ ID NO: 1045), AISGSGGSTFYAESVKG (SEQ ID NO: 1171), AISGSGGSTFYAESVQG (SEQ ID NO: 1213), AISGSGGGTFYAESVKG (SEQ ID NO: 1227), LISGSGGRTYYAESVKG (SEQ ID NO: 1241), AISGSGGRAQYAESVQG (SEQ ID NO: 1255), TISGSGGSTFYAESVKG (SEQ ID NO: 1437), YISSSGGYIYYAESVKG (SEQ ID NO: 1423), and VISGSGGITDFAESVKG (SEQ ID NO: 1367);
[0222] said CDR-H3 has an amino acid sequence selected from the group consisting of HDYSNYPYFDY (SEQ ID NO: 1088), VDYSNYLFFDY (SEQ ID NO: 1046), HDYSNYAYFDY (SEQ ID NO: 1438), GDYSNYAYFDY (SEQ ID NO: 1424), and HDYSNYFFFDY (SEQ ID NO: 1368);
[0223] said CDR-L1 has an amino acid sequence selected from the group consisting of RASQSIRSSYLA (SEQ ID NO: 1089), RASQSVRSTYLA (SEQ ID NO: 1145), RAGQSVRSSYLG (SEQ ID NO: 1047), RASQSVRSSYLA (SEQ ID NO: 1173), RASQSVRSNYLA (SEQ ID NO: 1187), RASQSVRGNYLA (SEQ ID NO: 1215), RASQSIRSNYLA (SEQ ID NO: 1229), RASQSVSSNLA (SEQ ID NO: 1257), RASQGVRSDYLA (SEQ ID NO: 1271), RASQGVRSSYLA (SEQ ID NO: 1341), and RASQGISNYLA (SEQ ID NO: 1369);
[0224] said CDR-L2 has an amino acid sequence selected from the group consisting of GASSRAT (SEQ ID NO: 1048), GASNRAT (SEQ ID NO: 1244), GSSSRAT (SEQ ID NO: 1258), AASTLQS (SEQ ID NO: 1426) and AASILQS (SEQ ID NO: 1370); and
[0225] said CDR-L3 has an amino acid sequence selected from the group consisting of QQYGDLPFT (SEQ ID NO: 1091); QQYGYSPPT (SEQ ID NO: 1049), QQYGYSPFT (SEQ ID NO: 1217), QQYGSSPFT (SEQ ID NO: 1231), QQYGISPPT (SEQ ID NO: 1245), QQYGSSPPP (SEQ ID NO: 1259), QQYGSTPPT (SEQ ID NO: 1273), QQYGSSPPT (SEQ ID NO: 1343), QQYYSTPLT (SEQ ID NO: 1427), and QQYFAYPIT (SEQ ID NO: 1371).

[0226] The term “variable” refers to the portions of the antibody or immunoglobulin domains that exhibit variability in their sequence and that are involved in determining the specificity and binding affinity of a particular antibody (i.e., the “variable domain(s)”). The pairing of a variable heavy chain (VH) and a variable light chain (VL) together forms a single antigen-binding site.

[0227] Variability is not evenly distributed throughout the variable domains of antibodies; it is concentrated in sub-domains of each of the heavy and light chain variable regions. These sub-domains are called “hypervariable regions” or “complementarity determining regions” (CDRs). The more conserved (i.e., non-hypervariable) portions of the variable domains are called the “framework” regions (FRM or FR) and provide a scaffold for the six CDRs in three dimensional space to form an antigen-binding surface. The variable domains of naturally occurring heavy and light chains each comprise four FRM regions (FR1, FR2, FR3, and FR4), largely adopting a β-sheet configuration, connected by three hypervariable regions, which form loops connecting, and in some cases forming part of, the β-sheet structure. The hypervariable regions in each chain are held together in close proximity by the FRM and, with the hypervariable regions from the other chain, contribute to the formation of the antigen-binding site (see Kabat et al., loc. cit.).

[0228] The terms “CDR”, and its plural “CDRs”, refer to the complementarity determining region of which three make up the binding character of a light chain variable region (CDR-L1, CDR-L2 and CDR-L3) and three make up the binding character of a heavy chain variable region (CDR-H1, CDR-H2 and CDR-H3). CDRs contain most of the residues responsible for specific interactions of the antibody with the antigen and hence contribute to the functional activity of an antibody molecule: they are the main determinants of antigen specificity.

[0229] The exact definitional CDR boundaries and lengths are subject to different classification and numbering systems. CDRs may therefore be referred to by Kabat, Chothia, contact or any other boundary definitions, including the numbering system described herein. Despite differing boundaries, each of these systems has some degree of overlap in what constitutes the so called “hypervariable regions” within the variable sequences. CDR definitions according to these systems may therefore differ in length and boundary areas with respect to the adjacent framework region. See for example Kabat (an approach based on cross-species sequence variability), Chothia (an approach based on crystallographic studies of antigen-antibody complexes), and/or MacCallum (Kabat et al., loc. cit.; Chothia et al., J. Mol. Biol, 1987, 196: 901-917; and MacCallum et al., J. Mol. Biol, 1996, 262: 732). Still another standard for characterizing the antigen binding site is the AbM definition used by Oxford Molecular's AbM antibody modeling software. See, e.g., Protein Sequence and Structure Analysis of Antibody Variable Domains. In: Antibody Engineering Lab Manual (Ed.: Duebel, S. and Kontermann, R., Springer-Verlag, Heidelberg). To the extent that two residue identification techniques define regions of overlapping, but not identical regions, they can be combined to define a hybrid CDR. However, the numbering in accordance with the so-called Kabat system is preferred.

[0230] Typically, CDRs form a loop structure that can be classified as a canonical structure. The term “canonical structure” refers to the main chain conformation that is adopted by the antigen binding (CDR) loops. From comparative structural studies, it has been found that five of the six antigen binding loops have only a limited repertoire of available conformations. Each canonical structure can be characterized by the torsion angles of the polypeptide backbone. Correspondent loops between antibodies may, therefore, have very similar three dimensional structures, despite high amino acid sequence variability in most parts of the loops (Chothia and Lesk, J. Mol. Biol., 1987, 196: 901; Chothia et al., Nature, 1989, 342: 877; Martin and Thornton, J. Mol. Biol, 1996, 263: 800). Furthermore, there is a relationship between the adopted loop structure and the amino acid sequences surrounding it. The conformation of a particular canonical class is determined by the length of the loop and the amino acid residues residing at key positions within the loop, as well as within the conserved framework (i.e., outside of the loop). Assignment to a particular canonical class can therefore be made based on the presence of these key amino acid residues.

[0231] The term “canonical structure” may also include considerations as to the linear sequence of the antibody, for example, as catalogued by Kabat (Kabat et al., loc. cit.). The Kabat numbering scheme (system) is a widely adopted standard for numbering the amino acid residues of an antibody variable domain in a consistent manner and is the preferred scheme applied in the present invention as also mentioned elsewhere herein. Additional structural considerations can also be used to determine the canonical structure of an antibody. For example, those differences not fully reflected by Kabat numbering can be described by the numbering system of Chothia et al. and/or revealed by other techniques, for example, crystallography and two- or three-dimensional computational modeling. Accordingly, a given antibody sequence may be placed into a canonical class which allows for, among other things, identifying appropriate chassis sequences (e.g., based on a desire to include a variety of canonical structures in a library). Kabat numbering of antibody amino acid sequences and structural considerations as described by Chothia et al., loc. cit. and their implications for construing canonical aspects of antibody structure, are described in the literature. The subunit structures and three-dimensional configurations of different classes of immunoglobulins are well known in the art. For a review of the antibody structure, see Antibodies: A Laboratory Manual, Cold Spring Harbor Laboratory, eds. Harlow et al., 1988.

[0232] The CDR3 of the light chain and, particularly, the CDR3 of the heavy chain may constitute the most important determinants in antigen binding within the light and heavy chain variable regions. In some antibody constructs, the heavy chain CDR3 appears to constitute the major area of contact between the antigen and the antibody. In vitro selection schemes in which CDR3 alone is varied can be used to vary the binding properties of an antibody or determine which residues contribute to the binding of an antigen. Hence, CDR3 is typically the greatest source of molecular diversity within the antibody-binding site. H3, for example, can be as short as two amino acid residues or greater than 26 amino acids.

[0233] In a classical full-length antibody or immunoglobulin, each light (L) chain is linked to a heavy (H) chain by one covalent disulfide bond, while the two H chains are linked to each other by one or more disulfide bonds depending on the H chain isotype. The CH domain most proximal to VH is usually designated as CH1. The constant (“C”) domains are not directly involved in antigen binding, but exhibit various effector functions, such as antibody-dependent, cell-mediated cytotoxicity and complement activation. The Fc region of an antibody is comprised within the heavy chain constant domains and is for example able to interact with cell surface located Fc receptors.

[0234] The sequence of antibody genes after assembly and somatic mutation is highly varied, and these varied genes are estimated to encode 10¹⁰ different antibody molecules (Immunoglobulin Genes, 2^{nd} ed., eds. Jonio et al., Academic Press, San Diego, Calif., 1995). Accordingly, the immune system provides a repertoire of immunoglobulins. The term “repertoire” refers to at least one nucleotide sequence derived wholly or partially from at least one sequence encoding at least one immunoglobulin. The sequence(s) may be generated by rearrangement in vivo of the V, D, and J segments of heavy chains, and the V and J segments of light chains. Alternatively, the sequence(s) can be generated from a cell in response to which rearrangement occurs, e.g., in vitro stimulation. Alternatively, part or all of the sequence(s) may be obtained by DNA splicing, nucleotide synthesis, mutagenesis, and other methods, see, e.g., U.S. Pat. No. 5,565,332. A repertoire may include only one sequence or may include a plurality of sequences, including ones in a genetically diverse collection.

[0235] A preferred antibody construct according to the invention can also be defined as a bispecific antibody construct comprising a first (preferably human) binding domain which binds to human CD70 on the surface of a target cell and a second binding domain which binds to human CD3 on the surface of a T cell, wherein the first binding domain binds to the same epitope on human CD70 as an antibody selected from the group consisting of CD70-1 to CD70-74 and those as depicted in items 75 to 112 below, i.e., an antibody comprising a VH region comprising CDR-H1, CDR-H2 and CDR-H3 and a VL region comprising CDR-L1, CDR-L2 and CDR-L3, wherein said CDR-H1, CDR-H2, CDR-H3, CDR-L1, CDR-L2 and CDR-L3 are selected from the group consisting of those depicted in:
[0236] 1) SEQ ID NOs: 1-6;
[0237] 2) SEQ: ID NOs: 11-16;
[0238] 3) SEQ: ID NOs: 21-26;
[0239] 4) SEQ: ID NOs: 31-36;
[0240] 5) SEQ: ID NOs: 41-46;
[0241] 6) SEQ: ID NOs: 51-56;
[0242] 7) SEQ: ID NOs: 61-66;
[0243] 8) SEQ: ID NOs: 71-76;
[0244] 9) SEQ: ID NOs: 81-86;
[0245] 10) SEQ: ID NOs: 91-96;
[0246] 11) SEQ: ID NOs: 101-106;
[0247] 12) SEQ: ID NOs: 111-116;
[0248] 13) SEQ: ID NOs: 121-126;
[0249] 14) SEQ: ID NOs: 131-136;
[0250] 15) SEQ: ID NOs: 141-146;
[0251] 16) SEQ: ID NOs: 151-156;
[0252] 17) SEQ: ID NOs: 161-166;
[0253] 18) SEQ: ID NOs: 171-176;
[0254] 19) SEQ: ID NOs: 181-186;
[0255] 20) SEQ: ID NOs: 191-196;
[0256] 21) SEQ: ID NOs: 201-206;
[0257] 22) SEQ: ID NOs: 211-216;
[0258] 23) SEQ: ID NOs: 221-226;
[0259] 24) SEQ: ID NOs: 231-236;
[0260] 25) SEQ: ID NOs: 241-246;
[0261] 26) SEQ: ID NOs: 251-256;
[0262] 27) SEQ: ID NOs: 261-266;
[0263] 28) SEQ: ID NOs: 271-276;
[0264] 29) SEQ: ID NOs: 281-286;
[0265] 30) SEQ: ID NOs: 291-296;
[0266] 31) SEQ: ID NOs: 301-306;
[0267] 32) SEQ: ID NOs: 311-316;
[0268] 33) SEQ: ID NOs: 321-326;
[0269] 34) SEQ: ID NOs: 331-336;
[0270] 35) SEQ: ID NOs: 341-346;
[0271] 36) SEQ: ID NOs: 351-356;
[0272] 37) SEQ: ID NOs: 361-366;
[0273] 38) SEQ: ID NOs: 371-376;
[0274] 39) SEQ: ID NOs: 381-386;
[0275] 40) SEQ: ID NOs: 391-396;
[0276] 41) SEQ: ID NOs: 401-406;
[0277] 42) SEQ: ID NOs: 411-416;
[0278] 43) SEQ: ID NOs: 421-426;
[0279] 44) SEQ: ID NOs: 431-436;
[0280] 45) SEQ: ID NOs: 441-446;
[0281] 46) SEQ: ID NOs: 451-456;
[0282] 47) SEQ: ID NOs: 461-466;
[0283] 48) SEQ: ID NOs: 471-476;
[0284] 49) SEQ: ID NOs: 481-486;
[0285] 50) SEQ: ID NOs: 491-496;
[0286] 51) SEQ: ID NOs: 501-506;
[0287] 52) SEQ: ID NOs: 511-516;
[0288] 53) SEQ: ID NOs: 521-526;
[0289] 54) SEQ: ID NOs: 531-536;
[0290] 55) SEQ: ID NOs: 541-546;
[0291] 56) SEQ: ID NOs: 551-556;
[0292] 57) SEQ: ID NOs: 561-566;
[0293] 56) SEQ: ID NOs: 571-576;
[0294] 59) SEQ: ID NOs: 561-586;
[0295] 60) SEQ: ID NOs: 591-596;
[0296] 61) SEQ: ID NOs: 601-606;
[0297] 62) SEQ: ID NOs: 611-616;
[0298] 63) SEQ: ID NOs: 621-626;
[0299] 64) SEQ: ID NOs: 631-636;
[0300] 65) SEQ: ID NOs: 641-646;
[0301] 66) SEQ: ID NOs: 651-656;
[0302] 67) SEQ: ID NOs: 661-666;
[0303] 68) SEQ: ID NOs: 671-676;
[0304] 69) SEQ: ID NOs: 681-686;
[0305] 70) SEQ: ID NOs: 691-696;
[0306] 71) SEQ: ID NOs: 701-706;
[0307] 72) SEQ: ID NOs: 711-716;
[0308] 73) SEQ: ID NOs: 721-726;
[0309] 74) SEQ: ID NOs: 731-736;
[0310] 75) SEQ: ID NOs: 1044-1049;
[0311] 76) SEQ: ID NOs: 1058-1063;
[0312] 77) SEQ: ID NOs: 1072-1077;
[0313] 78) SEQ: ID NOs: 1086-1091;
[0314] 79) SEQ: ID NOs: 1100-1005;
[0315] 80) SEQ: ID NOs: 1114-1119;
[0316] 81)SEQ: ID NOs: 1128-1133;
[0317] 82) SEQ: ID NOs: 1142-1147;
[0318] 63) SEQ: ID NOs: 1156-1161;
[0319] 84) SEQ: ID NOs: 1170-1175;
[0320] 65) SEQ: ID NOs: 1184-1189;
[0321] 86) SEQ: ID NOs: 1198-1203;
[0322] 87) SEQ: ID NOs: 1212-1217;
[0323] 88) SEQ: ID NOs: 1226-1231;
[0324] 89) SEQ: ID NOs: 1240-1245;
[0325] 90) SEQ: ID NOs: 1254-1250;
[0326] 91) SEQ: ID NOs: 1268-1273;
[0327] 92) SEQ: ID NOs: 1282-1287;
[0328] 93) SEQ: ID NOs: 1296-1301;
[0329] 94) SEQ: ID NOs: 1310-1315;
[0330] 95) SEQ: ID NOs: 1324-1329;
[0331] 96) SEQ: ID NOs: 1338-1343;
[0332] 97) SEQ: ID NOs: 1352-1357;
[0333] 98) SEQ: ID NOs: 136-1371;
[0334] 99) SEQ: ID NOs: 1380-1385;
[0335] 100) SEQ: ID NOs: 1394-1399;
[0336] 101) SEQ: ID NOs: 1408-1413;
[0337] 102) SEQ: ID NOs: 1422-1427;
[0338] 103) SEQ: ID NOs: 1436-1441;
[0339] 104) SEQ: ID NOs: 1450-1455;
[0340] 105) SEQ: ID NOs: 1464-1469;
[0341] 106) SEQ: ID NOs: 1478-1483;
[0342] 107) SEQ: ID NOs: 1492-1497;
[0343] 108) SEQ: ID NOs: 1506-1511;
[0344] 109) SEQ: ID NOs: 1520-1525;
[0345] 110) SEQ: ID NOs: 1534-1539;
[0346] 111) SEQ: ID NOs: 1548-1553; and
[0347] 112) SEQ: ID NOs: 1562-1567.

[0348] Whether or not an antibody construct binds to the same epitope of CD70 as another given antibody construct can be measured e.g. by epitope mapping with chimeric or truncated target molecules, e.g. as described herein above and in Example 2.

[0349] A preferred antibody construct according to the invention can also be defined as a bispecific antibody construct comprising a first (preferably human) binding domain which binds to human CD70 on the surface of a target cell and a second binding domain which binds to human CD3 on the surface of a T cell, wherein the first binding domain competes for binding with an antibody selected from the group consisting of CD70-1 to CD70-74 and those as depicted in items 75 to 112 above, i.e., an antibody comprising a VH region comprising CDR-H1, CDR-H2 and CDR-H3 and a VL region comprising CDR-L1, CDR-L2 and CDR-L3 selected from the group consisting of those described in items 1) to 112) above.

[0350] Whether or not an antibody construct competes for binding with another given antibody construct can be measured in a competition assay such as a competitive ELISA or a cell-based competition assay. Avidin-coupled microparticles (beads) can also be used. Similar to an avidin-coated ELISA plate, when reacted with a biotinylated protein, each of these beads can be used as a substrate on which an assay can be performed. Antigen is coated onto a bead and then precoated with the first antibody. The second antibody is added and any additional binding is determined. Read-out occurs via flow cytometry. See FIG. 2.

[0351] In one embodiment, the first binding domain of the antibody construct of the invention comprises a VH region selected from the group consisting of those depicted in SEQ ID NO: 7, SEQ ID NO: 17, SEQ ID NO: 27, SEQ ID NO: 37, SEQ ID NO: 47, SEQ ID NO: 57, SEQ ID NO: 67, SEQ ID NO: 77, SEQ ID NO: 87, SEQ ID NO: 97, SEQ ID NO: 107, SEQ ID NO: 117, SEQ ID NO: 127, SEQ ID NO: 137, SEQ ID NO: 147, SEQ ID NO: 157, SEQ ID NO: 167, SEQ ID NO: 177, SEQ ID NO: 187, SEQ ID NO: 197, SEQ ID NO: 207, SEQ ID NO: 217, SEQ ID NO: 227, SEQ ID NO: 237, SEQ ID NO: 247, SEQ ID NO: 257, SEQ ID NO: 267, SEQ ID NO: 277, SEQ ID NO: 287, SEQ ID NO: 297, SEQ ID NO: 307, SEQ ID NO: 317, SEQ ID NO: 327, SEQ ID NO: 337, SEQ ID NO: 347, SEQ ID NO: 357, SEQ ID NO: 367, SEQ ID NO: 377, SEQ ID NO: 387, SEQ ID NO: 397, SEQ ID NO: 407, SEQ ID NO: 417, SEQ ID NO: 427, SEQ ID NO: 437, SEQ ID NO: 447, SEQ ID NO: 457, SEQ ID NO: 467, SEQ ID NO: 477, SEQ ID NO: 487, SEQ ID NO: 497, SEQ ID NO: 507, SEQ ID NO: 517, SEQ ID NO: 527, SEQ ID NO: 537, SEQ ID NO: 547, SEQ ID NO: 557, SEQ ID NO: 567, SEQ ID NO: 577, SEQ ID NO: 587, SEQ ID NO: 597, SEQ ID NO: 607, SEQ ID NO: 617, SEQ ID NO: 627, SEQ ID NO: 637, SEQ ID NO: 647, SEQ ID NO: 657, SEQ ID NO: 667, SEQ ID NO: 677, SEQ ID NO: 687, SEQ ID NO: 697, SEQ ID NO: 707, SEQ ID NO: 717, SEQ ID NO: 727, SEQ ID NO: 737, SEQ ID NO: 920, SEQ ID NO: 924, SEQ ID NO: 928, SEQ ID NO: 932, SEQ ID NO: 936, SEQ ID NO: 940, SEQ ID NO: 944, SEQ ID NO: 948, SEQ ID NO: 952, SEQ ID NO: 956, SEQ ID NO: 960, SEQ ID NO: 964, SEQ ID NO: 968, SEQ ID NO: 972, SEQ ID NO: 976, SEQ ID NO: 980, SEQ ID NO: 984, SEQ ID NO: 988, SEQ ID NO: 992, SEQ ID NO: 996, SEQ ID NO: 1000, SEQ ID NO: 1004, SEQ ID NO: 1008, SEQ ID NO: 1012, SEQ ID NO: 1016, SEQ ID NO: 1020, SEQ ID NO: 1024, SEQ ID NO: 1028, SEQ ID NO: 1032, SEQ ID NO: 1036, SEQ ID NO: 1040, SEQ ID NO: 1050, SEQ ID NO: 1054, SEQ ID NO: 1064, SEQ ID NO: 1068, SEQ ID NO: 1078, SEQ ID NO: 1082, SEQ ID NO: 1092, SEQ ID NO: 1096, SEQ ID NO: 1106, SEQ ID NO: 1110, SEQ ID NO: 1120, SEQ ID NO: 1124, SEQ ID NO: 1134, SEQ ID NO: 1138, SEQ ID NO: 1148, SEQ ID NO: 1152, SEQ ID NO: 1162, SEQ ID NO: 1166, SEQ ID NO: 1176, SEQ ID NO: 1180, SEQ ID NO: 1190, SEQ ID NO: 1194, SEQ ID NO: 1204, SEQ ID NO: 1208, SEQ ID NO: 1218, SEQ ID NO: 1222, SEQ ID NO: 1232, SEQ ID NO: 1236, SEQ ID NO: 1246, SEQ ID NO: 1250, SEQ ID NO: 1260, SEQ ID NO: 1264, SEQ ID NO: 1274, SEQ ID NO: 1278, SEQ ID NO: 1288, SEQ ID NO: 1292, SEQ ID NO: 1302, SEQ ID NO: 1306, SEQ ID NO: 1316, SEQ ID NO: 1320, SEQ ID NO: 1330, SEQ ID NO: 1334, SEQ ID NO: 1344, SEQ ID NO: 1348, SEQ ID NO: 1358, SEQ ID NO: 1362, SEQ ID NO: 1372, SEQ ID NO: 1376, SEQ ID NO: 1386, SEQ ID NO: 1390, SEQ ID NO: 1400, SEQ ID NO: 1404, SEQ ID NO: 1414, SEQ ID NO: 1418, SEQ ID NO: 1428, SEQ ID NO: 1432, SEQ ID NO: 1442, SEQ ID NO: 1446, SEQ ID NO: 1456, SEQ ID NO: 1460, SEQ ID NO: 1470, SEQ ID NO: 1474, SEQ ID NO: 1484, SEQ ID NO: 1488, SEQ ID NO: 1498, SEQ ID NO: 1502, SEQ ID NO: 1512, SEQ ID NO: 1516, SEQ ID NO: 1526, SEQ ID NO: 1530, SEQ ID NO: 1540, SEQ ID NO: 1544, SEQ ID NO: 1554, SEQ ID NO: 1558, SEQ ID NO: 1568, and SEQ ID NO: 1572.

[0352] Preferred is when the first binding domain of the antibody construct of the invention comprises a VH region selected from the group consisting of those depicted in SEQ ID NO: 1050, SEQ ID NO: 1092, SEQ ID NO: 1148, SEQ ID NO: 1176, SEQ ID NO: 1190, SEQ ID NO: 1218, SEQ ID NO: 1232, SEQ ID NO: 1246, SEQ ID NO: 1260, SEQ ID NO: 1274, SEQ ID NO: 1344, SEQ ID NO: 1358, SEQ ID NO: 1372, SEQ ID NO: 1428, and SEQ ID NO: 1442.

[0353] In a further embodiment, the first binding domain of the antibody construct of the invention comprises a VL region selected from the group consisting of those depicted in SEQ ID NO: 8, SEQ ID NO: 18, SEQ ID NO: 28, SEQ ID NO: 38, SEQ ID NO: 48, SEQ ID NO: 58, SEQ ID NO: 68, SEQ ID NO: 78, SEQ ID NO: 88, SEQ ID NO: 98, SEQ ID NO: 108, SEQ ID NO: 118, SEQ ID NO: 128, SEQ ID NO: 138, SEQ ID NO: 148, SEQ ID NO: 158, SEQ ID NO: 168, SEQ ID NO: 178, SEQ ID NO: 188, SEQ ID NO: 198, SEQ ID NO: 208, SEQ ID NO: 218, SEQ ID NO: 228, SEQ ID NO: 238, SEQ ID NO: 248, SEQ ID NO: 258, SEQ ID NO: 268, SEQ ID NO: 278, SEQ ID NO: 288, SEQ ID NO: 298, SEQ ID NO: 308, SEQ ID NO: 318, SEQ ID NO: 328, SEQ ID NO: 338, SEQ ID NO: 348, SEQ ID NO: 358, SEQ ID NO: 368, SEQ ID NO: 378, SEQ ID NO: 388, SEQ ID NO: 398, SEQ ID NO: 408, SEQ ID NO: 418, SEQ ID NO: 428, SEQ ID NO: 438, SEQ ID NO: 448, SEQ ID NO: 458, SEQ ID NO: 468, SEQ ID NO: 478, SEQ ID NO: 488, SEQ ID NO: 498, SEQ ID NO: 508, SEQ ID NO: 518, SEQ ID NO: 528, SEQ ID NO: 538, SEQ ID NO: 548, SEQ ID NO: 558, SEQ ID NO: 568, SEQ ID NO: 578, SEQ ID NO: 588, SEQ ID NO: 598, SEQ ID NO: 608, SEQ ID NO: 618, SEQ ID NO: 628, SEQ ID NO: 638, SEQ ID NO: 648, SEQ ID NO: 658, SEQ ID NO: 668, SEQ ID NO: 678, SEQ ID NO: 688, SEQ ID NO: 698, SEQ ID NO: 708, SEQ ID NO: 718, SEQ ID NO: 728, SEQ ID NO: 738, SEQ ID NO: 921, SEQ ID NO: 925, SEQ ID NO: 929, SEQ ID NO: 933, SEQ ID NO: 937, SEQ ID NO: 941, SEQ ID NO: 945, SEQ ID NO: 949, SEQ ID NO: 953, SEQ ID NO: 957, SEQ ID NO: 961, SEQ ID NO: 965, SEQ ID NO: 969, SEQ ID NO: 973, SEQ ID NO: 977, SEQ ID NO: 981, SEQ ID NO: 985, SEQ ID NO: 989, SEQ ID NO: 993, SEQ ID NO: 997, SEQ ID NO: 1001, SEQ ID NO: 1005, SEQ ID NO: 1009, SEQ ID NO: 1013, SEQ ID NO: 1017, SEQ ID NO: 1021, SEQ ID NO: 1025, SEQ ID NO: 1029, SEQ ID NO: 1033, SEQ ID NO: 1037, SEQ ID NO: 1041, SEQ ID NO: 1051, SEQ ID NO: 1055, SEQ ID NO: 1065, SEQ ID NO: 1069, SEQ ID NO: 1079, SEQ ID NO: 1083, SEQ ID NO: 1093, SEQ ID NO: 1097, SEQ ID NO: 1107, SEQ ID NO: 1111, SEQ ID NO: 1121, SEQ ID NO: 1125, SEQ ID NO: 1135, SEQ ID NO: 1139, SEQ ID NO: 1149, SEQ ID NO: 1153, SEQ ID NO: 1163, SEQ ID NO: 1167, SEQ ID NO: 1177, SEQ ID NO: 1181, SEQ ID NO: 1191, SEQ ID NO: 1195, SEQ ID NO: 1205, SEQ ID NO: 1209, SEQ ID NO: 1219, SEQ ID NO: 1223, SEQ ID NO: 1233, SEQ ID NO: 1237, SEQ ID NO: 1247, SEQ ID NO: 1251, SEQ ID NO: 1261, SEQ ID NO: 1265, SEQ ID NO: 1275, SEQ ID NO: 1279, SEQ ID NO: 1289, SEQ ID NO: 1293, SEQ ID NO: 1303, SEQ ID NO: 1307, SEQ ID NO: 1317, SEQ ID NO: 1321, SEQ ID NO: 1331, SEQ ID NO: 1335, SEQ ID NO: 1345, SEQ ID NO: 1349, SEQ ID NO: 1359, SEQ ID NO: 1363, SEQ ID NO: 1373, SEQ ID NO: 1377, SEQ ID NO: 1387, SEQ ID NO: 1391, SEQ ID NO: 1401, SEQ ID NO: 1405, SEQ ID NO: 1415, SEQ ID NO: 1419, SEQ ID NO: 1429, SEQ ID NO: 1433, SEQ ID NO: 1443, SEQ ID NO: 1447, SEQ ID NO: 1457, SEQ ID NO: 1461, SEQ ID NO: 1471, SEQ ID NO: 1475, SEQ ID NO: 1485, SEQ ID NO: 1489, SEQ ID NO: 1499, SEQ ID NO: 1503, SEQ ID NO: 1513, SEQ ID NO: 1517, SEQ ID NO: 1527, SEQ ID NO: 1531, SEQ ID NO: 1541, SEQ ID NO: 1545, SEQ ID NO: 1555, SEQ ID NO: 1559, SEQ ID NO: 1569, and SEQ ID NO: 1573.

[0354] Preferred is when the first binding domain of the antibody construct of the invention comprises a VL region selected from the group consisting of those depicted in SEQ ID NO: 1051, SEQ ID NO: 1093, SEQ ID NO: 1149, SEQ ID NO: 1177, SEQ ID NO: 1191, SEQ ID NO: 1219, SEQ ID NO: 1233, SEQ ID NO: 1247, SEQ ID NO: 1261, SEQ ID NO: 1275, SEQ ID NO: 1345, SEQ ID NO: 1359, SEQ ID NO: 1373, SEQ ID NO: 1429, and SEQ ID NO: 1443.

[0355] In another embodiment, the first binding domain of the antibody construct of the invention comprises a VH region and a VL region selected from the group consisting of pairs of a VH region and a VL region as depicted in SEQ ID NOs: 7+8, SEQ ID NOs: 17+18, SEQ ID NOs: 27+28, SEQ ID NOs: 37+38, SEQ ID NOs: 47+48, SEQ ID NOs: 57+58, SEQ ID NOs: 67+68, SEQ ID NOs: 77+78, SEQ ID NOs: 87+88, SEQ ID NOs: 97+98, SEQ ID NOs: 107+108, SEQ ID NOs: 117+118, SEQ ID NOs: 127+128, SEQ ID NOs: 137+138, SEQ ID NOs: 147+148, SEQ ID NOs: 157+158, SEQ ID NOs: 167+168, SEQ ID NOs: 177+178, SEQ ID NOs: 187+188, SEQ ID NOs: 197+198, SEQ ID NOs: 207+208, SEQ ID NOs: 217+218, SEQ ID NOs: 227+228, SEQ ID NOs: 237+238, SEQ ID NOs: 247+248, SEQ ID NOs: 257+258, SEQ ID NOs: 267+268, SEQ ID NOs: 277+278, SEQ ID NOs: 287+288, SEQ ID NOs: 297+298, SEQ ID NOs: 307+308, SEQ ID NOs: 317+318, SEQ ID NOs: 327+328, SEQ ID NOs: 337+338, SEQ ID NOs: 347+348, SEQ ID NOs: 357+358, SEQ ID NOs: 367+368, SEQ ID NOs: 377+378, SEQ ID NOs: 387+388, SEQ ID NOs: 397+398, SEQ ID NOs: 407+408, SEQ ID NOs: 417+418, SEQ ID NOs: 427+428, SEQ ID NOs: 437+438, SEQ ID NOs: 447+448, SEQ ID NOs: 457+458, SEQ ID NOs: 467+468, SEQ ID NOs: 477+478, SEQ ID NOs: 487+488, SEQ ID NOs: 497+498, SEQ ID NOs: 507+508, SEQ ID NOs: 517+518, SEQ ID NOs: 527+528, SEQ ID NOs: 537+538, SEQ ID NOs: 547+548, SEQ ID NOs: 557+558, SEQ ID NOs: 567+568, SEQ ID NOs: 577+578, SEQ ID NOs: 587+588, SEQ ID NOs: 597+598, SEQ ID NOs: 607+608, SEQ ID NOs: 617+618, SEQ ID NOs: 627+628, SEQ ID NOs: 637+638, SEQ ID NOs: 647+648, SEQ ID NOs: 657+658, SEQ ID NOs: 667+668, SEQ ID NOs: 677+678, SEQ ID NOs: 687+688, SEQ ID NOs: 697+698, SEQ ID NOs: 707+708, SEQ ID NOs: 717+718, SEQ ID NOs: 727+728, SEQ ID NOs: 737+738, SEQ ID NOs: 920+921, SEQ ID NOs: 924+925, SEQ ID NOs: 928+929, SEQ ID NOs: 932+933, SEQ ID NOs: 936+937, SEQ ID NOs: 940+941, SEQ ID NOs: 944+945, SEQ ID NOs: 948+949, SEQ ID NOs: 952+953, SEQ ID NOs: 956+957, SEQ ID NOs: 960+961, SEQ ID NOs: 964+965, SEQ ID NOs: 968+969, SEQ ID NOs: 972+973, SEQ ID NOs: 976+977, SEQ ID NOs: 980+981, SEQ ID NOs: 984+985, SEQ ID NOs: 988+989, SEQ ID NOs: 992+993, SEQ ID NOs: 996+997, SEQ ID NOs: 1000+1001, SEQ ID NOs: 1004+1005, SEQ ID NOs: 1008+1009, SEQ ID NOs: 1012+1013, SEQ ID NOs: 1016+1017, SEQ ID NOs: 1020+1021, SEQ ID NOs: 1024+1025, SEQ ID NOs: 1028+1029, SEQ ID NOs: 1032+1033, SEQ ID NOs: 1036+1037, SEQ ID NOs: 1040+1041, SEQ ID NOs: 1050+1051, SEQ ID NOs: 1054+1055, SEQ ID NOs: 1064+1065, SEQ ID NOs: 1068+1069, SEQ ID NOs: 1078+1079, SEQ ID NOs: 1082+1083, SEQ ID NOs: 1092+1093, SEQ ID NOs: 1096+1097, SEQ ID NOs: 1106+1107, SEQ ID NOs: 1110+1111, SEQ ID NOs: 1120+1121, SEQ ID NOs: 1124+1125, SEQ ID NOs: 1134+1135, SEQ ID NOs: 1138+1139, SEQ ID NOs: 1148+1149, SEQ ID NOs: 1152+1153, SEQ ID NOs: 1162+1163, SEQ ID NOs: 1166+1167, SEQ ID NOs: 1176+1177, SEQ ID NOs: 1180+1181, SEQ ID NOs: 1190+1191, SEQ ID NOs: 1194+1195, SEQ ID NOs: 1204+1205, SEQ ID NOs: 1208+1209, SEQ ID NOs: 1218+1219, SEQ ID NOs: 1222+1223, SEQ ID NOs: 1232+1233, SEQ ID NOs: 1236+1237, SEQ ID NOs: 1246+1247, SEQ ID NOs: 1250+1251, SEQ ID NOs: 1260+1261, SEQ ID NOs: 1264+1265, SEQ ID NOs: 1274+1275, SEQ ID NOs: 1278+1279, SEQ ID NOs: 1288+1289, SEQ ID NOs: 1292+1293, SEQ ID NOs: 1302+1303, SEQ ID NOs: 1306+1307, SEQ ID NOs: 1316+1317, SEQ ID NOs: 1320+1321, SEQ ID NOs: 1330+1331, SEQ ID NOs: 1334+1335, SEQ ID NOs: 1344+1345, SEQ ID NOs: 1348+1349, SEQ ID NOs: 1358+1359, SEQ ID NOs: 1362+1363, SEQ ID NOs: 1372+1373, SEQ ID NOs: 1376+1377, SEQ ID NOs: 1386+1387, SEQ ID NOs: 1390+1391, SEQ ID NOs: 1400+1401, SEQ ID NOs: 1404+1405, SEQ ID NOs: 1414+1415, SEQ ID NOs: 1418+1419, SEQ ID NOs: 1428+1429, SEQ ID NOs: 1432+1433, SEQ ID NOs: 1442+1443, SEQ ID NOs: 1446+1447, SEQ ID NOs: 1456+1457, SEQ ID NOs: 1460+1461, SEQ ID NOs: 1470+1471, SEQ ID NOs: 1474+1475, SEQ ID NOs: 1484+1485, SEQ ID NOs: 1488+1489, SEQ ID NOs: 1498+1499, SEQ ID NOs: 1502+1503, SEQ ID NOs: 1512+1513, SEQ ID NOs: 1516+1517, SEQ ID NOs: 1526+1527, SEQ ID NOs: 1530+1531, SEQ ID NOs: 1540+1541, SEQ ID NOs: 1544+1545, SEQ ID NOs: 1554+1555, SEQ ID NOs: 1558+1559, SEQ ID NOs: 1568+1569, and SEQ ID NOs: 1572+1573.

[0356] Preferred is when the first binding domain of the antibody construct of the invention comprises a VH region and a VL region selected from the group consisting of pairs of a VH region and a VL region as depicted in SEQ ID NOs: 1050+1051, SEQ ID NOs: 1092+1093, SEQ ID NOs: 1148+1149, SEQ ID NOs: 1176+1177, SEQ ID NOs: 1190+1191, SEQ ID NOs: 1218+1219, SEQ ID NOs: 1232+1233, SEQ ID NOs: 1246+1247, SEQ ID NOs: 1260+1261, SEQ ID NOs: 1274+1275, SEQ ID NOs: 1344+1345, SEQ ID NOs: 1358+1359, NOs: 1372+1373, SEQ ID NOs: 1428+1429, and SEQ ID NOs: 1442+1443.

[0357] In yet a further embodiment, the first binding domain of the antibody construct of the invention comprises a polypeptide selected from the group consisting of those depicted in SEQ ID NO: 9, SEQ ID NO: 19, SEQ ID NO: 29, SEQ ID NO: 39, SEQ ID NO: 49, SEQ ID NO: 59, SEQ ID NO: 69, SEQ ID NO: 79, SEQ ID NO: 89, SEQ ID NO: 99, SEQ ID NO: 109, SEQ ID NO: 119, SEQ ID NO: 129, SEQ ID NO: 139, SEQ ID NO: 149, SEQ ID NO: 159, SEQ ID NO: 169, SEQ ID NO: 179, SEQ ID NO: 189, SEQ ID NO: 199, SEQ ID NO: 209, SEQ ID NO: 219, SEQ ID NO: 229, SEQ ID NO: 239, SEQ ID NO: 249, SEQ ID NO: 259, SEQ ID NO: 269, SEQ ID NO: 279, SEQ ID NO: 289, SEQ ID NO: 299, SEQ ID NO: 309, SEQ ID NO: 319, SEQ ID NO: 329, SEQ ID NO: 339, SEQ ID NO: 349, SEQ ID NO: 359, SEQ ID NO: 369, SEQ ID NO: 379, SEQ ID NO: 389, SEQ ID NO: 399, SEQ ID NO: 409, SEQ ID NO: 419, SEQ ID NO: 429, SEQ ID NO: 439, SEQ ID NO: 449, SEQ ID NO: 459, SEQ ID NO: 469, SEQ ID NO: 479, SEQ ID NO: 489, SEQ ID NO: 499, SEQ ID NO: 509, SEQ ID NO: 519, SEQ ID NO: 529, SEQ ID NO: 539, SEQ ID NO: 549, SEQ ID NO: 559, SEQ ID NO: 569, SEQ ID NO: 579, SEQ ID NO: 589, SEQ ID NO: 599, SEQ ID NO: 609, SEQ ID NO: 619, SEQ ID NO: 629, SEQ ID NO: 639, SEQ ID NO: 649, SEQ ID NO: 659, SEQ ID NO: 669, SEQ ID NO: 679, SEQ ID NO: 689, SEQ ID NO: 699, SEQ ID NO: 709, SEQ ID NO: 719, SEQ ID NO: 729, SEQ ID NO: 739, SEQ ID NO: 922, SEQ ID NO: 926, SEQ ID NO: 930, SEQ ID NO: 934, SEQ ID NO: 938, SEQ ID NO: 942, SEQ ID NO: 946, SEQ ID NO: 950, SEQ ID NO: 954, SEQ ID NO: 958, SEQ ID NO: 962, SEQ ID NO: 966, SEQ ID NO: 970, SEQ ID NO: 974, SEQ ID NO: 978, SEQ ID NO: 982, SEQ ID NO: 986, SEQ ID NO: 990, SEQ ID NO: 994, SEQ ID NO: 998, SEQ ID NO: 1002, SEQ ID NO: 1006, SEQ ID NO: 1010, SEQ ID NO: 1014, SEQ ID NO: 1018, SEQ ID NO: 1022, SEQ ID NO: 1026, SEQ ID NO: 1030, SEQ ID NO: 1034, SEQ ID NO: 1038, SEQ ID NO: 1042, SEQ ID NO: 1052, SEQ ID NO: 1056, SEQ ID NO: 1066, SEQ ID NO: 1070, SEQ ID NO: 1080, SEQ ID NO: 1084, SEQ ID NO: 1094, SEQ ID NO: 1098, SEQ ID NO: 1108, SEQ ID NO: 1112, SEQ ID NO: 1122, SEQ ID NO: 1126, SEQ ID NO: 1136, SEQ ID NO: 1140, SEQ ID NO: 1150, SEQ ID NO: 1154, SEQ ID NO: 1164, SEQ ID NO: 1168, SEQ ID NO: 1178, SEQ ID NO: 1182, SEQ ID NO: 1192, SEQ ID NO: 1196, SEQ ID NO: 1206, SEQ ID NO: 1210, SEQ ID NO: 1220, SEQ ID NO: 1224, SEQ ID NO: 1234, SEQ ID NO: 1238, SEQ ID NO: 1248, SEQ ID NO: 1252, SEQ ID NO: 1262, SEQ ID NO: 1266, SEQ ID NO: 1276, SEQ ID NO: 1280, SEQ ID NO: 1290, SEQ ID NO: 1294, SEQ ID NO: 1304, SEQ ID NO: 1308, SEQ ID NO: 1318, SEQ ID NO: 1322, SEQ ID NO: 1332, SEQ ID NO: 1336, SEQ ID NO: 1346, SEQ ID NO: 1350, SEQ ID NO: 1360, SEQ ID NO: 1364, SEQ ID NO: 1374, SEQ ID NO: 1378, SEQ ID NO: 1388, SEQ ID NO: 1392, SEQ ID NO: 1402, SEQ ID NO: 1406, SEQ ID NO: 1416, SEQ ID NO: 1420, SEQ ID NO: 1430, SEQ ID NO: 1434, SEQ ID NO: 1444, SEQ ID NO: 1448, SEQ ID NO: 1458, SEQ ID NO: 1462, SEQ ID NO: 1472, SEQ ID NO: 1476, SEQ ID NO: 1486, SEQ ID NO: 1490, SEQ ID NO: 1500, SEQ ID NO: 1504, SEQ ID NO: 1514, SEQ ID NO: 1518, SEQ ID NO: 1528, SEQ ID NO: 1532, SEQ ID NO: 1542, SEQ ID NO: 1546, SEQ ID NO: 1556, SEQ ID NO: 1560, SEQ ID NO: 1570, and SEQ ID NO: 1574.

[0358] Preferred is when the first binding domain of the antibody construct of the invention comprises a polypeptide selected from the group consisting of those depicted in SEQ ID NO: 1052, SEQ ID NO: 1094, SEQ ID NO: 1150, SEQ ID NO: 1178, SEQ ID NO: 1192, SEQ ID NO: 1220, SEQ ID NO: 1234, SEQ ID NO: 1248, SEQ ID NO: 1262, SEQ ID NO: 1276, SEQ ID NO: 1346, SEQ ID NO: 1360, SEQ ID NO: 1374, SEQ ID NO: 1430, and SEQ ID NO: 1444.

[0359] The term “bispecific” as used herein refers to an antibody construct which is “at least bispecific”, i.e., it comprises at least a first binding domain and a second binding domain, wherein the first binding domain binds to one antigen or target (here: CD70), and the second binding domain binds to another antigen or target (here: CD3). Accordingly, antibody constructs according to the invention comprise specificities for at least two different antigens or targets. The term “bispecific antibody construct” of the invention also encompasses multispecific antibody constructs such as trispecific antibody constructs, the latter ones including three binding domains, or constructs having more than three (e.g. four, five . . . ) specificites.

[0360] Given that the antibody constructs according to the invention are (at least) bispecific, they do not occur naturally and they are markedly different from naturally occurring products. A “bispecific” antibody construct or immunoglobulin is hence an artificial hybrid antibody or immunoglobulin having at least two distinct binding sites with different specificities. Bispecific antibody constructs can be produced by a variety of methods including fusion of hybridomas or linking of Fab′ fragments. See, e.g., Songsivilai & Lachmann, Clin. Exp. Immunol. 79:315-321 (1990).

[0361] The at least two binding domains and the variable domains of the antibody construct of the present invention may or may not comprise peptide linkers (spacer peptides). The term “peptide linker” comprises in accordance with the present invention an amino acid sequence by which the amino acid sequences of one (variable and/or binding) domain and another (variable and/or binding) domain of the antibody construct of the invention are linked with each other. An essential technical feature of such peptide linker is that it does not comprise any polymerization activity. Among the suitable peptide linkers are those described in U.S. Pat. Nos. 4,751,180 and 4,935,233 or WO 88/09344. The peptide linkers can also be used to attach other domains or modules or regions (such as half-life extending domains) to the antibody construct of the invention.

[0362] In the event that a linker is used, this linker is preferably of a length and sequence sufficient to ensure that each of the first and second domains can, independently from one another, retain their differential binding specificities. For peptide linkers which connect the at least two binding domains (or two variable domains) in the antibody construct of the invention, those peptide linkers are preferred which comprise only a few number of amino acid residues, e.g. 12 amino acid residues or less. Thus, peptide linkers of 12, 11, 10, 9, 8, 7, 6 or 5 amino acid residues are preferred. An envisaged peptide linker with less than 5 amino acids comprises 4, 3, 2 or one amino acid(s), wherein Gly-rich linkers are preferred. A particularly preferred “single” amino acid in the context of said “peptide linker” is Gly. Accordingly, said peptide linker may consist of the single amino acid Gly. Another preferred embodiment of a peptide linker is characterized by the amino acid sequence Gly-Gly-Gly-Gly-Ser, i.e. Gly₄Ser (SEQ ID NO: 771), or polymers thereof, i.e. (Gly₄Ser)x, where x is an integer of 1 or greater (e.g. 2 or 3). Preferred linkers are depicted in SEQ ID NOs: 770-778. The characteristics of said peptide linker, which comprise the absence of the promotion of secondary structures, are known in the art and are described e.g. in Dall'Acqua et al. (Biochem. (1998) 37, 9266-9273), Cheadle et al. (Mol Immunol (1992) 29, 21-30) and Raag and Whitlow (FASEB (1995) 9(1), 73-80). Peptide linkers which furthermore do not promote any secondary structures are preferred. The linkage of said domains to each other can be provided, e.g., by genetic engineering, as described in the examples. Methods for preparing fused and operatively linked bispecific single chain constructs and expressing them in mammalian cells or bacteria are well-known in the art (e.g. WO 99/54440 or Sambrook et al., Molecular Cloning: A Laboratory Manual, Cold Spring Harbor Laboratory Press, Cold Spring Harbor, N.Y., 2001).

[0363] As described herein above, the invention provides a preferred embodiment wherein the antibody construct is in a format selected from the group consisting of (scFv)2, scFv-single domain mAb, diabodies and oligomers of any of the aforementioned formats. The term “is in a format” does not exclude that the construct can be further modified by attachment or fusion to other moieties, as described herein.

[0364] According to a particularly preferred embodiment, and as documented in the appended examples, the antibody construct of the invention is a “bispecific single chain antibody construct”, more preferably a bispecific “single chain Fv” (scFv). Although the two domains of the Fv fragment, VL and VH, are coded for by separate genes, they can be joined, using recombinant methods, by a synthetic linker—as described hereinbefore—that enables them to be made as a single protein chain in which the VL and VH regions pair to form a monovalent molecule; see e.g., Huston et al. (1988) Proc. Natl. Acad. Sci USA 85:5879-5883). These antibody fragments are obtained using conventional techniques known to those with skill in the art, and the fragments are evaluated for function in the same manner as are whole or full-length antibodies. A single-chain variable fragment (scFv) is hence a fusion protein of the variable region of the heavy chain (VH) and of the light chain (VL) of immunoglobulins, usually connected with a short linker peptide of about ten to about 25 amino acids, preferably about 15 to 20 amino acids. The linker is usually rich in glycine for flexibility, as well as serine or threonine for solubility, and can either connect the N-terminus of the VH with the C-terminus of the VL, or vice versa. This protein retains the specificity of the original immunoglobulin, despite removal of the constant regions and introduction of the linker.

[0365] Bispecific single chain molecules are known in the art and are described in WO 99/54440, Mack, J. Immunol. (1997), 158, 3965-3970, Mack, PNAS, (1995), 92, 7021-7025, Kufer, Cancer Immunol. Immunother., (1997), 45, 193-197, Löffler, Blood, (2000), 95, 6, 2098-2103, Brühl, Immunol., (2001), 166, 2420-2426, Kipriyanov, J. Mol. Biol., (1999), 293, 41-56. Techniques described for the production of single chain antibodies (see, inter alia, U.S. Pat. No. 4,946,778, Kontermann and Dübel (2010), loc. cit. and Little (2009), loc. cit.) can be adapted to produce single chain antibody constructs specifically recognizing (an) elected target(s).

[0366] Bivalent (also called divalent) or bispecific single-chain variable fragments (bi-scFvs or di-scFvs having the format (scFv)2 can be engineered by linking two scFv molecules (e.g. with linkers as described hereinbefore). If these two scFv molecules have the same binding specificity, the resulting (scFv)2 molecule will preferably be called bivalent (i.e. it has two valences for the same target epitope). If the two scFv molecules have different binding specificities, the resulting (scFv)2 molecule will preferably be called bispecific. The linking can be done by producing a single peptide chain with two VH regions and two VL regions, yielding tandem scFvs (see e.g. Kufer P. et al., (2004) Trends in Biotechnology 22(5):238-244). Another possibility is the creation of scFv molecules with linker peptides that are too short for the two variable regions to fold together (e.g. about five amino acids), forcing the scFvs to dimerize. This type is known as diabodies (see e.g. Hollinger, Philipp et al., (July 1993) Proceedings of the National Academy of Sciences of the United States of America 90 (14): 6444-8.).

[0367] According to a further preferred embodiment of the antibody construct of the invention the heavy chain (VH) and the light chain (VL) of a binding domain (binding either to the target antigen CD70 or to CD3) are not directly connected via a peptide linker as described above, but the binding domains are formed as described for the diabody. Thus, the VH of the CD3 binding domain may be fused to the VL of the CD70 binding domain via a peptide linker, and the VH of the CD70 binding domain is fused to the VL of the CD3 binding domain via such peptide linker.

[0368] Single domain antibodies comprise merely one (monomeric) antibody variable domain which is able to bind selectively to a specific antigen, independently of other V regions or domains. The first single domain antibodies were engineered from heavy chain antibodies found in camelids, and these are called VHH fragments. Cartilaginous fishes also have heavy chain antibodies (IgNAR) from which single domain antibodies called VNAR fragments can be obtained. An alternative approach is to split the dimeric variable domains from common immunoglobulins e.g. from humans or rodents into monomers, hence obtaining VH or VL as a single domain Ab. Although most research into single domain antibodies is currently based on heavy chain variable domains, nanobodies derived from light chains have also been shown to bind specifically to target epitopes. Examples of single domain antibodies are called sdAb, nanobodies or single variable domain antibodies.

[0369] A (single domain mAb)2 is hence a monoclonal antibody construct composed of (at least) two single domain monoclonal antibodies, which are individually selected from the group comprising VH, VL, VHH and VNAR. The linker is preferably in the form of a peptide linker. Similarly, an “scFv-single domain mAb” is a monoclonal antibody construct composed of at least one single domain antibody as described above and one scFv molecule as described above. Again, the linker is preferably in the form of a peptide linker.

[0370] It is also envisaged that the antibody construct of the invention has, in addition to its function to bind to the target molecules CD70 and CD3, a further function. In this format, the antibody construct is a trifunctional or multifunctional antibody construct by targeting target cells through binding to CD70, mediating cytotoxic T cell activity through CD3 binding and providing a further function such as a fully functional Fc constant domain mediating antibody-dependent cellular cytotoxicity through recruitment of effector cells like NK cells, a label (fluorescent etc.), a therapeutic agent such as a toxin or radionuclide, and/or means to enhance serum half-life, etc.

[0371] Examples for means to extend serum half-life of the antibody constructs of the invention include peptides, proteins or domains of proteins, which are fused or otherwise attached to the antibody constructs. The group of peptides, proteins or protein domains includes peptides binding to other proteins with preferred pharmacokinetic profile in the human body such as serum albumin (see WO 2009/127691). An alternative concept of such half-life extending peptides includes peptides binding to the neonatal Fc receptor (FcRn, see WO 2007/098420), which can also be used in the constructs of the present invention. The concept of attaching larger domains of proteins or complete proteins includes e.g. the fusion of human serum albumin, variants or mutants of human serum albumin (see WO 2011/051489, WO 2012/059486, WO 2012/150319, WO 2013/135896, WO 2014/072481, WO 2013/075066) or domains thereof as well as the fusion of constant region of immunoglobulins (Fc domains) and variants thereof. Such variants of Fc domains may be optimized/modified in order to allow the desired pairing of dimers or mulimers, to abolish Fc receptor binding (e.g. the Fcγ receptor) or for other reasons. A further concept known in the art to extend the half-life of small protein compounds in the human body is the pegylation of those compounds such as the antibody construct of the present invention.

[0372] In a preferred embodiment, the bispecific antibody constructs according to the invention may be linked (e.g. via peptide bond) with a fusion partner (such as a protein or polypeptide or peptide), e.g. for the purpose of extending the construct's serum half-life. These fusion partners can be selected from human serum albumin (“HSA” or “HALB”) as wells as sequence variants thereof, peptides binding to HSA, peptides binding to FcRn (“FcRn BP”), or constructs comprising an (antibody derived) Fc region. Exemplary sequences of these fusion partners are depticed in SEQ ID NOs: 780-826. In general, the fusion partners may be linked to the N-terminus or to the C-terminus of the bispecific antibody constructs according to the invention, either directly (e.g. via peptide bond) or through a peptide linker such as (GGGGS)n (wherein “n” is an integer of 2 or greater, e.g. 2 or 3 or 4). Suitable peptide linkers are depticed in SEQ ID NOs: 770-778.

[0373] Hence, a preferred antibody construct according to the present invention comprises:

[0374] (a) a polypeptide comprising in the following order starting from the N-terminus:
[0375] a polypeptide having an amino acid sequence selected from the group consisting of SEQ ID NO: 9, SEQ ID NO: 19, SEQ ID NO: 29, SEQ ID NO: 39, SEQ ID NO: 49, SEQ ID NO: 59, SEQ ID NO: 69, SEQ ID NO: 79, SEQ ID NO: 89, SEQ ID NO: 99, SEQ ID NO: 109, SEQ ID NO: 119, SEQ ID NO: 129, SEQ ID NO: 139, SEQ ID NO: 149, SEQ ID NO: 159, SEQ ID NO: 169, SEQ ID NO: 179, SEQ ID NO: 189, SEQ ID NO: 199, SEQ ID NO: 209, SEQ ID NO: 219, SEQ ID NO: 229, SEQ ID NO: 239, SEQ ID NO: 249, SEQ ID NO: 259, SEQ ID NO: 269, SEQ ID NO: 279, SEQ ID NO: 289, SEQ ID NO: 299, SEQ ID NO: 309, SEQ ID NO: 319, SEQ ID NO: 329, SEQ ID NO: 339, SEQ ID NO: 349, SEQ ID NO: 359, SEQ ID NO: 369, SEQ ID NO: 379, SEQ ID NO: 389, SEQ ID NO: 399, SEQ ID NO: 409, SEQ ID NO: 419, SEQ ID NO: 429, SEQ ID NO: 439, SEQ ID NO: 449, SEQ ID NO: 459, SEQ ID NO: 469, SEQ ID NO: 479, SEQ ID NO: 489, SEQ ID NO: 499, SEQ ID NO: 509, SEQ ID NO: 519, SEQ ID NO: 529, SEQ ID NO: 539, SEQ ID NO: 549, SEQ ID NO: 559, SEQ ID NO: 569, SEQ ID NO: 579, SEQ ID NO: 589, SEQ ID NO: 599, SEQ ID NO: 609, SEQ ID NO: 619, SEQ ID NO: 629, SEQ ID NO: 639, SEQ ID NO: 649, SEQ ID NO: 659, SEQ ID NO: 669, SEQ ID NO: 679, SEQ ID NO: 689, SEQ ID NO: 699, SEQ ID NO: 709, SEQ ID NO: 719, SEQ ID NO: 729, SEQ ID NO: 739, SEQ ID NO: 922, SEQ ID NO: 926, SEQ ID NO: 930, SEQ ID NO: 934, SEQ ID NO: 938, SEQ ID NO: 942, SEQ ID NO: 946, SEQ ID NO: 950, SEQ ID NO: 954, SEQ ID NO: 958, SEQ ID NO: 962, SEQ ID NO: 966, SEQ ID NO: 970, SEQ ID NO: 974, SEQ ID NO: 978, SEQ ID NO: 982, SEQ ID NO: 986, SEQ ID NO: 990, SEQ ID NO: 994, SEQ ID NO: 998, SEQ ID NO: 1002, SEQ ID NO: 1006, SEQ ID NO: 1010, SEQ ID NO: 1014, SEQ ID NO: 1018, SEQ ID NO: 1022, SEQ ID NO: 1026, SEQ ID NO: 1030, SEQ ID NO: 1034, SEQ ID NO: 1038, SEQ ID NO: 1042, SEQ ID NO: 1052, SEQ ID NO: 1056, SEQ ID NO: 1066, SEQ ID NO: 1070, SEQ ID NO: 1080, SEQ ID NO: 1084, SEQ ID NO: 1094, SEQ ID NO: 1098, SEQ ID NO: 1108, SEQ ID NO: 1112, SEQ ID NO: 1122, SEQ ID NO: 1126, SEQ ID NO: 1136, SEQ ID NO: 1140, SEQ ID NO: 1150, SEQ ID NO: 1154, SEQ ID NO: 1164, SEQ ID NO: 1168, SEQ ID NO: 1178, SEQ ID NO: 1182, SEQ ID NO: 1192, SEQ ID NO: 1196, SEQ ID NO: 1206, SEQ ID NO: 1210, SEQ ID NO: 1220, SEQ ID NO: 1224, SEQ ID NO: 1234, SEQ ID NO: 1238, SEQ ID NO: 1248, SEQ ID NO: 1252, SEQ ID NO: 1262, SEQ ID NO: 1266, SEQ ID NO: 1276, SEQ ID NO: 1280, SEQ ID NO: 1290, SEQ ID NO: 1294, SEQ ID NO: 1304, SEQ ID NO: 1308, SEQ ID NO: 1318, SEQ ID NO: 1322, SEQ ID NO: 1332, SEQ ID NO: 1336, SEQ ID NO: 1346, SEQ ID NO: 1350, SEQ ID NO: 1360, SEQ ID NO: 1364, SEQ ID NO: 1374, SEQ ID NO: 1378, SEQ ID NO: 1388, SEQ ID NO: 1392, SEQ ID NO: 1402, SEQ ID NO: 1406, SEQ ID NO: 1416, SEQ ID NO: 1420, SEQ ID NO: 1430, SEQ ID NO: 1434, SEQ ID NO: 1444, SEQ ID NO: 1448, SEQ ID NO: 1458, SEQ ID NO: 1462, SEQ ID NO: 1472, SEQ ID NO: 1476, SEQ ID NO: 1486, SEQ ID NO: 1490, SEQ ID NO: 1500, SEQ ID NO: 1504, SEQ ID NO: 1514, SEQ ID NO: 1518, SEQ ID NO: 1528, SEQ ID NO: 1532, SEQ ID NO: 1542, SEQ ID NO: 1546, SEQ ID NO: 1556, SEQ ID NO: 1560, SEQ ID NO: 1570, and SEQ ID NO: 1574;
[0376] a peptide linker having an amino acid sequence selected from the group consisting of SEQ ID NOs: 770-778; and
[0377] a polypeptide having an amino acid sequence selected from the group consisting of SEQ ID NO: 835, SEQ ID NO: 844, SEQ ID NO: 853, SEQ ID NO: 862, SEQ ID NO: 871, SEQ ID NO: 880, SEQ ID NO: 889, SEQ ID NO: 898, SEQ ID NO: 907, SEQ ID NO: 916, and SEQ ID NO: 919; and
[0378] optionally a His-tag, such as the one depicted in SEQ ID NO 779;

[0379] (b) a polypeptide comprising in the following order starting from the N-terminus:
[0380] a polypeptide having an amino acid sequence selected from the group consisting of SEQ ID NO: 9, SEQ ID NO: 19, SEQ ID NO: 29, SEQ ID NO: 39, SEQ ID NO: 49, SEQ ID NO: 59, SEQ ID NO: 69, SEQ ID NO: 79, SEQ ID NO: 89, SEQ ID NO: 99, SEQ ID NO: 109, SEQ ID NO: 119, SEQ ID NO: 129, SEQ ID NO: 139, SEQ ID NO: 149, SEQ ID NO: 159, SEQ ID NO: 169, SEQ ID NO: 179, SEQ ID NO: 189, SEQ ID NO: 199, SEQ ID NO: 209, SEQ ID NO: 219, SEQ ID NO: 229, SEQ ID NO: 239, SEQ ID NO: 249, SEQ ID NO: 259, SEQ ID NO: 269, SEQ ID NO: 279, SEQ ID NO: 289, SEQ ID NO: 299, SEQ ID NO: 309, SEQ ID NO: 319, SEQ ID NO: 329, SEQ ID NO: 339, SEQ ID NO: 349, SEQ ID NO: 359, SEQ ID NO: 369, SEQ ID NO: 379, SEQ ID NO: 389, SEQ ID NO: 399, SEQ ID NO: 409, SEQ ID NO: 419, SEQ ID NO: 429, SEQ ID NO: 439, SEQ ID NO: 449, SEQ ID NO: 459, SEQ ID NO: 469, SEQ ID NO: 479, SEQ ID NO: 489, SEQ ID NO: 499, SEQ ID NO: 509, SEQ ID NO: 519, SEQ ID NO: 529, SEQ ID NO: 539, SEQ ID NO: 549, SEQ ID NO: 559, SEQ ID NO: 569, SEQ ID NO: 579, SEQ ID NO: 589, SEQ ID NO: 599, SEQ ID NO: 609, SEQ ID NO: 619, SEQ ID NO: 629, SEQ ID NO: 639, SEQ ID NO: 649, SEQ ID NO: 659, SEQ ID NO: 669, SEQ ID NO: 679, SEQ ID NO: 689, SEQ ID NO: 699, SEQ ID NO: 709, SEQ ID NO: 719, SEQ ID NO: 729, SEQ ID NO: 739, SEQ ID NO: 922, SEQ ID NO: 926, SEQ ID NO: 930, SEQ ID NO: 934, SEQ ID NO: 938, SEQ ID NO: 942, SEQ ID NO: 946, SEQ ID NO: 950, SEQ ID NO: 954, SEQ ID NO: 958, SEQ ID NO: 962, SEQ ID NO: 966, SEQ ID NO: 970, SEQ ID NO: 974, SEQ ID NO: 978, SEQ ID NO: 982, SEQ ID NO: 986, SEQ ID NO: 990, SEQ ID NO: 994, SEQ ID NO: 998, SEQ ID NO: 1002, SEQ ID NO: 1006, SEQ ID NO: 1010, SEQ ID NO: 1014, SEQ ID NO: 1018, SEQ ID NO: 1022, SEQ ID NO: 1026, SEQ ID NO: 1030, SEQ ID NO: 1034, SEQ ID NO: 1038, SEQ ID NO: 1042, SEQ ID NO: 1052, SEQ ID NO: 1056, SEQ ID NO: 1066, SEQ ID NO: 1070, SEQ ID NO: 1080, SEQ ID NO: 1084, SEQ ID NO: 1094, SEQ ID NO: 1098, SEQ ID NO: 1108, SEQ ID NO: 1112, SEQ ID NO: 1122, SEQ ID NO: 1126, SEQ ID NO: 1136, SEQ ID NO: 1140, SEQ ID NO: 1150, SEQ ID NO: 1154, SEQ ID NO: 1164, SEQ ID NO: 1168, SEQ ID NO: 1178, SEQ ID NO: 1182, SEQ ID NO: 1192, SEQ ID NO: 1196, SEQ ID NO: 1206, SEQ ID NO: 1210, SEQ ID NO: 1220, SEQ ID NO: 1224, SEQ ID NO: 1234, SEQ ID NO: 1238, SEQ ID NO: 1248, SEQ ID NO: 1252, SEQ ID NO: 1262, SEQ ID NO: 1266, SEQ ID NO: 1276, SEQ ID NO: 1280, SEQ ID NO: 1290, SEQ ID NO: 1294, SEQ ID NO: 1304, SEQ ID NO: 1308, SEQ ID NO: 1318, SEQ ID NO: 1322, SEQ ID NO: 1332, SEQ ID NO: 1336, SEQ ID NO: 1346, SEQ ID NO: 1350, SEQ ID NO: 1360, SEQ ID NO: 1364, SEQ ID NO: 1374, SEQ ID NO: 1378, SEQ ID NO: 1388, SEQ ID NO: 1392, SEQ ID NO: 1402, SEQ ID NO: 1406, SEQ ID NO: 1416, SEQ ID NO: 1420, SEQ ID NO: 1430, SEQ ID NO: 1434, SEQ ID NO: 1444, SEQ ID NO: 1448, SEQ ID NO: 1458, SEQ ID NO: 1462, SEQ ID NO: 1472, SEQ ID NO: 1476, SEQ ID NO: 1486, SEQ ID NO: 1490, SEQ ID NO: 1500, SEQ ID NO: 1504, SEQ ID NO: 1514, SEQ ID NO: 1518, SEQ ID NO: 1528, SEQ ID NO: 1532, SEQ ID NO: 1542, SEQ ID NO: 1546, SEQ ID NO: 1556, SEQ ID NO: 1560, SEQ ID NO: 1570, and SEQ ID NO: 1574;
[0381] a peptide linker having an amino acid sequence selected from the group consisting of SEQ ID NOs: 770-778;
[0382] a polypeptide having an amino acid sequence selected from the group consisting of SEQ ID NO: 835, SEQ ID NO: 844, SEQ ID NO: 853, SEQ ID NO: 862, SEQ ID NO: 871, SEQ ID NO: 880, SEQ ID NO: 889, SEQ ID NO: 898, SEQ ID NO: 907, SEQ ID NO: 916, and SEQ ID NO: 919;
[0383] optionally a peptide linker having an amino acid sequence selected from the group consisting of SEQ ID NOs: 770-778;
[0384] a polypeptide having an amino acid sequence selected from the group consisting of SEQ ID NOs: 780 and 786-815; and
[0385] optionally a His-tag, such as the one depicted in SEQ ID NO 779;

[0386] (c) a polypeptide comprising in the following order starting from the N-terminus:
[0387] a polypeptide having the amino acid sequence QRFVTGHFGGLX1 PANG (SEQ ID NO: 781) wherein X1 is Y or H; and
[0388] a polypeptide having an amino acid sequence selected from the group consisting of SEQ ID NO: 9, SEQ ID NO: 19, SEQ ID NO: 29, SEQ ID NO: 39, SEQ ID NO: 49, SEQ ID NO: 59, SEQ ID NO: 69, SEQ ID NO: 79, SEQ ID NO: 89, SEQ ID NO: 99, SEQ ID NO: 109, SEQ ID NO: 119, SEQ ID NO: 129, SEQ ID NO: 139, SEQ ID NO: 149, SEQ ID NO: 159, SEQ ID NO: 169, SEQ ID NO: 179, SEQ ID NO: 189, SEQ ID NO: 199, SEQ ID NO: 209, SEQ ID NO: 219, SEQ ID NO: 229, SEQ ID NO: 239, SEQ ID NO: 249, SEQ ID NO: 259, SEQ ID NO: 269, SEQ ID NO: 279, SEQ ID NO: 289, SEQ ID NO: 299, SEQ ID NO: 309, SEQ ID NO: 319, SEQ ID NO: 329, SEQ ID NO: 339, SEQ ID NO: 349, SEQ ID NO: 359, SEQ ID NO: 369, SEQ ID NO: 379, SEQ ID NO: 389, SEQ ID NO: 399, SEQ ID NO: 409, SEQ ID NO: 419, SEQ ID NO: 429, SEQ ID NO: 439, SEQ ID NO: 449, SEQ ID NO: 459, SEQ ID NO: 469, SEQ ID NO: 479, SEQ ID NO: 489, SEQ ID NO: 499, SEQ ID NO: 509, SEQ ID NO: 519, SEQ ID NO: 529, SEQ ID NO: 539, SEQ ID NO: 549, SEQ ID NO: 559, SEQ ID NO: 569, SEQ ID NO: 579, SEQ ID NO: 589, SEQ ID NO: 599, SEQ ID NO: 609, SEQ ID NO: 619, SEQ ID NO: 629, SEQ ID NO: 639, SEQ ID NO: 649, SEQ ID NO: 659, SEQ ID NO: 669, SEQ ID NO: 679, SEQ ID NO: 689, SEQ ID NO: 699, SEQ ID NO: 709, SEQ ID NO: 719, SEQ ID NO: 729, SEQ ID NO: 739, SEQ ID NO: 922, SEQ ID NO: 926, SEQ ID NO: 930, SEQ ID NO: 934, SEQ ID NO: 938, SEQ ID NO: 942, SEQ ID NO: 946, SEQ ID NO: 950, SEQ ID NO: 954, SEQ ID NO: 958, SEQ ID NO: 962, SEQ ID NO: 966, SEQ ID NO: 970, SEQ ID NO: 974, SEQ ID NO: 978, SEQ ID NO: 982, SEQ ID NO: 986, SEQ ID NO: 990, SEQ ID NO: 994, SEQ ID NO: 998, SEQ ID NO: 1002, SEQ ID NO: 1006, SEQ ID NO: 1010, SEQ ID NO: 1014, SEQ ID NO: 1018, SEQ ID NO: 1022, SEQ ID NO: 1026, SEQ ID NO: 1030, SEQ ID NO: 1034, SEQ ID NO: 1038, SEQ ID NO: 1042, SEQ ID NO: 1052, SEQ ID NO: 1056, SEQ ID NO: 1066, SEQ ID NO: 1070, SEQ ID NO: 1080, SEQ ID NO: 1084, SEQ ID NO: 1094, SEQ ID NO: 1098, SEQ ID NO: 1108, SEQ ID NO: 1112, SEQ ID NO: 1122, SEQ ID NO: 1126, SEQ ID NO: 1136, SEQ ID NO: 1140, SEQ ID NO: 1150, SEQ ID NO: 1154, SEQ ID NO: 1164, SEQ ID NO: 1168, SEQ ID NO: 1178, SEQ ID NO: 1182, SEQ ID NO: 1192, SEQ ID NO: 1196, SEQ ID NO: 1206, SEQ ID NO: 1210, SEQ ID NO: 1220, SEQ ID NO: 1224, SEQ ID NO: 1234, SEQ ID NO: 1238, SEQ ID NO: 1248, SEQ ID NO: 1252, SEQ ID NO: 1262, SEQ ID NO: 1266, SEQ ID NO: 1276, SEQ ID NO: 1280, SEQ ID NO: 1290, SEQ ID NO: 1294, SEQ ID NO: 1304, SEQ ID NO: 1308, SEQ ID NO: 1318, SEQ ID NO: 1322, SEQ ID NO: 1332, SEQ ID NO: 1336, SEQ ID NO: 1346, SEQ ID NO: 1350, SEQ ID NO: 1360, SEQ ID NO: 1364, SEQ ID NO: 1374, SEQ ID NO: 1378, SEQ ID NO: 1388, SEQ ID NO: 1392, SEQ ID NO: 1402, SEQ ID NO: 1406, SEQ ID NO: 1416, SEQ ID NO: 1420, SEQ ID NO: 1430, SEQ ID NO: 1434, SEQ ID NO: 1444, SEQ ID NO: 1448, SEQ ID NO: 1458, SEQ ID NO: 1462, SEQ ID NO: 1472, SEQ ID NO: 1476, SEQ ID NO: 1486, SEQ ID NO: 1490, SEQ ID NO: 1500, SEQ ID NO: 1504, SEQ ID NO: 1514, SEQ ID NO: 1518, SEQ ID NO: 1528, SEQ ID NO: 1532, SEQ ID NO: 1542, SEQ ID NO: 1546, SEQ ID NO: 1556, SEQ ID NO: 1560, SEQ ID NO: 1570, and SEQ ID NO: 1574;
[0389] a peptide linker having an amino acid sequence selected from the group consisting of SEQ ID NOs: 770-778;
[0390] a polypeptide having an amino acid sequence selected from the group consisting of SEQ ID NO: 835, SEQ ID NO: 844, SEQ ID NO: 853, SEQ ID NO: 862, SEQ ID NO: 871, SEQ ID NO: 880, SEQ ID NO: 889, SEQ ID NO: 898, SEQ ID NO: 907, SEQ ID NO: 916, and SEQ ID NO: 919;
[0391] a polypeptide having the amino acid sequence QRFVTGHFGGLHPANG (SEQ ID NO: 783) or QRFCTGHFGGLHPCNG (SEQ ID NO: 785); and
[0392] optionally a His-tag, such as the one depicted in SEQ ID NO 779;

[0393] (d) a polypeptide comprising in the following order starting from the N-terminus
[0394] a polypeptide having an amino acid sequence selected from the group consisting of SEQ ID NO: 833, SEQ ID NO: 842, SEQ ID NO: 851, SEQ ID NO: 860, SEQ ID NO: 869, SEQ ID NO: 878, SEQ ID NO: 887, SEQ ID NO: 896, SEQ ID NO: 905, SEQ ID NO: 914, and SEQ ID NO: 917;
[0395] a peptide linker having the amino acid sequence depicted in SEQ ID NO: 777;
[0396] a polypeptide having an amino acid sequence selected from the group consisting of SEQ ID NO: 8, SEQ ID NO: 18, SEQ ID NO: 28, SEQ ID NO: 38, SEQ ID NO: 48, SEQ ID NO: 58, SEQ ID NO: 68, SEQ ID NO: 78, SEQ ID NO: 88, SEQ ID NO: 98, SEQ ID NO: 108, SEQ ID NO: 118, SEQ ID NO: 128, SEQ ID NO: 138, SEQ ID NO: 148, SEQ ID NO: 158, SEQ ID NO: 168, SEQ ID NO: 178, SEQ ID NO: 188, SEQ ID NO: 198, SEQ ID NO: 208, SEQ ID NO: 218, SEQ ID NO: 228, SEQ ID NO: 238, SEQ ID NO: 248, SEQ ID NO: 258, SEQ ID NO: 268, SEQ ID NO: 278, SEQ ID NO: 288, SEQ ID NO: 298, SEQ ID NO: 308, SEQ ID NO: 318, SEQ ID NO: 328, SEQ ID NO: 338, SEQ ID NO: 348, SEQ ID NO: 358, SEQ ID NO: 368, SEQ ID NO: 378, SEQ ID NO: 388, SEQ ID NO: 398, SEQ ID NO: 408, SEQ ID NO: 418, SEQ ID NO: 428, SEQ ID NO: 438, SEQ ID NO: 448, SEQ ID NO: 458, SEQ ID NO: 468, SEQ ID NO: 478, SEQ ID NO: 488, SEQ ID NO: 498, SEQ ID NO: 508, SEQ ID NO: 518, SEQ ID NO: 528, SEQ ID NO: 538, SEQ ID NO: 548, SEQ ID NO: 558, SEQ ID NO: 568, SEQ ID NO: 578, SEQ ID NO: 588, SEQ ID NO: 598, SEQ ID NO: 608, SEQ ID NO: 618, SEQ ID NO: 628, SEQ ID NO: 638, SEQ ID NO: 648, SEQ ID NO: 658, SEQ ID NO: 668, SEQ ID NO: 678, SEQ ID NO: 688, SEQ ID NO: 698, SEQ ID NO: 708, SEQ ID NO: 718, SEQ ID NO: 728, SEQ ID NO: 738, SEQ ID NO: 921, SEQ ID NO: 925, SEQ ID NO: 929, SEQ ID NO: 933, SEQ ID NO: 937, SEQ ID NO: 941, SEQ ID NO: 945, SEQ ID NO: 949, SEQ ID NO: 953, SEQ ID NO: 957, SEQ ID NO: 961, SEQ ID NO: 965, SEQ ID NO: 969, SEQ ID NO: 973, SEQ ID NO: 977, SEQ ID NO: 981, SEQ ID NO: 985, SEQ ID NO: 989, SEQ ID NO: 993, SEQ ID NO: 997, SEQ ID NO: 1001, SEQ ID NO: 1005, SEQ ID NO: 1009, SEQ ID NO: 1013, SEQ ID NO: 1017, SEQ ID NO: 1021, SEQ ID NO: 1025, SEQ ID NO: 1029, SEQ ID NO: 1033, SEQ ID NO: 1037, SEQ ID NO: 1041, SEQ ID NO: 1051, SEQ ID NO: 1055, SEQ ID NO: 1065, SEQ ID NO: 1069, SEQ ID NO: 1079, SEQ ID NO: 1083, SEQ ID NO: 1093, SEQ ID NO: 1097, SEQ ID NO: 1107, SEQ ID NO: 1111, SEQ ID NO: 1121, SEQ ID NO: 1125, SEQ ID NO: 1135, SEQ ID NO: 1139, SEQ ID NO: 1149, SEQ ID NO: 1153, SEQ ID NO: 1163, SEQ ID NO: 1167, SEQ ID NO: 1177, SEQ ID NO: 1181, SEQ ID NO: 1191, SEQ ID NO: 1195, SEQ ID NO: 1205, SEQ ID NO: 1209, SEQ ID NO: 1219, SEQ ID NO: 1223, SEQ ID NO: 1233, SEQ ID NO: 1237, SEQ ID NO: 1247, SEQ ID NO: 1251, SEQ ID NO: 1261, SEQ ID NO: 1265, SEQ ID NO: 1275, SEQ ID NO: 1279, SEQ ID NO: 1289, SEQ ID NO: 1293, SEQ ID NO: 1303, SEQ ID NO: 1307, SEQ ID NO: 1317, SEQ ID NO: 1321, SEQ ID NO: 1331, SEQ ID NO: 1335, SEQ ID NO: 1345, SEQ ID NO: 1349, SEQ ID NO: 1359, SEQ ID NO: 1363, SEQ ID NO: 1373, SEQ ID NO: 1377, SEQ ID NO: 1387, SEQ ID NO: 1391, SEQ ID NO: 1401, SEQ ID NO: 1405, SEQ ID NO: 1415, SEQ ID NO: 1419, SEQ ID NO: 1429, SEQ ID NO: 1433, SEQ ID NO: 1443, SEQ ID NO: 1447, SEQ ID NO: 1457, SEQ ID NO: 1461, SEQ ID NO: 1471, SEQ ID NO: 1475, SEQ ID NO: 1485, SEQ ID NO: 1489, SEQ ID NO: 1499, SEQ ID NO: 1503, SEQ ID NO: 1513, SEQ ID NO: 1517, SEQ ID NO: 1527, SEQ ID NO: 1531, SEQ ID NO: 1541, SEQ ID NO: 1545, SEQ ID NO: 1555, SEQ ID NO: 1559, SEQ ID NO: 1569, and SEQ ID NO: 1573, followed by a serine residue at the C-terminus;
[0397] a polypeptide having the amino acid sequence depicted in SEQ ID NO: 816; and
[0398] a polypeptide comprising in the following order starting from the N-terminus:
[0399] a polypeptide having an amino acid sequence selected from the group consisting of SEQ ID NO: 7, SEQ ID NO: 17, SEQ ID NO: 27, SEQ ID NO: 37, SEQ ID NO: 47, SEQ ID NO: 57, SEQ ID NO: 67, SEQ ID NO: 77, SEQ ID NO: 87, SEQ ID NO: 97, SEQ ID NO: 107, SEQ ID NO: 117, SEQ ID NO: 127, SEQ ID NO: 137, SEQ ID NO: 147, SEQ ID NO: 157, SEQ ID NO: 167, SEQ ID NO: 177, SEQ ID NO: 187, SEQ ID NO: 197, SEQ ID NO: 207, SEQ ID NO: 217, SEQ ID NO: 227, SEQ ID NO: 237, SEQ ID NO: 247, SEQ ID NO: 257, SEQ ID NO: 267, SEQ ID NO: 277, SEQ ID NO: 287, SEQ ID NO: 297, SEQ ID NO: 307, SEQ ID NO: 317, SEQ ID NO: 327, SEQ ID NO: 337, SEQ ID NO: 347, SEQ ID NO: 357, SEQ ID NO: 367, SEQ ID NO: 377, SEQ ID NO: 387, SEQ ID NO: 397, SEQ ID NO: 407, SEQ ID NO: 417, SEQ ID NO: 427, SEQ ID NO: 437, SEQ ID NO: 447, SEQ ID NO: 457, SEQ ID NO: 467, SEQ ID NO: 477, SEQ ID NO: 487, SEQ ID NO: 497, SEQ ID NO: 507, SEQ ID NO: 517, SEQ ID NO: 527, SEQ ID NO: 537, SEQ ID NO: 547, SEQ ID NO: 557, SEQ ID NO: 567, SEQ ID NO: 577, SEQ ID NO: 587, SEQ ID NO: 597, SEQ ID NO: 607, SEQ ID NO: 617, SEQ ID NO: 627, SEQ ID NO: 637, SEQ ID NO: 647, SEQ ID NO: 657, SEQ ID NO: 667, SEQ ID NO: 677, SEQ ID NO: 687, SEQ ID NO: 697, SEQ ID NO: 707, SEQ ID NO: 717, SEQ ID NO: 727, SEQ ID NO: 737; SEQ ID NO: 920, SEQ ID NO: 924, SEQ ID NO: 928, SEQ ID NO: 932, SEQ ID NO: 936, SEQ ID NO: 940, SEQ ID NO: 944, SEQ ID NO: 948, SEQ ID NO: 952, SEQ ID NO: 956, SEQ ID NO: 960, SEQ ID NO: 964, SEQ ID NO: 968, SEQ ID NO: 972, SEQ ID NO: 976, SEQ ID NO: 980, SEQ ID NO: 984, SEQ ID NO: 988, SEQ ID NO: 992, SEQ ID NO: 996, SEQ ID NO: 1000, SEQ ID NO: 1004, SEQ ID NO: 1008, SEQ ID NO: 1012, SEQ ID NO: 1016, SEQ ID NO: 1020, SEQ ID NO: 1024, SEQ ID NO: 1028, SEQ ID NO: 1032, SEQ ID NO: 1036, SEQ ID NO: 1040, SEQ ID NO: 1050, SEQ ID NO: 1054, SEQ ID NO: 1064, SEQ ID NO: 1068, SEQ ID NO: 1078, SEQ ID NO: 1082, SEQ ID NO: 1092, SEQ ID NO: 1096, SEQ ID NO: 1106, SEQ ID NO: 1110, SEQ ID NO: 1120, SEQ ID NO: 1124, SEQ ID NO: 1134, SEQ ID NO: 1138, SEQ ID NO: 1148, SEQ ID NO: 1152, SEQ ID NO: 1162, SEQ ID NO: 1166, SEQ ID NO: 1176, SEQ ID NO: 1180, SEQ ID NO: 1190, SEQ ID NO: 1194, SEQ ID NO: 1204, SEQ ID NO: 1208, SEQ ID NO: 1218, SEQ ID NO: 1222, SEQ ID NO: 1232, SEQ ID NO: 1236, SEQ ID NO: 1246, SEQ ID NO: 1250, SEQ ID NO: 1260, SEQ ID NO: 1264, SEQ ID NO: 1274, SEQ ID NO: 1278, SEQ ID NO: 1288, SEQ ID NO: 1292, SEQ ID NO: 1302, SEQ ID NO: 1306, SEQ ID NO: 1316, SEQ ID NO: 1320, SEQ ID NO: 1330, SEQ ID NO: 1334, SEQ ID NO: 1344, SEQ ID NO: 1348, SEQ ID NO: 1358, SEQ ID NO: 1362, SEQ ID NO: 1372, SEQ ID NO: 1376, SEQ ID NO: 1386, SEQ ID NO: 1390, SEQ ID NO: 1400, SEQ ID NO: 1404, SEQ ID NO: 1414, SEQ ID NO: 1418, SEQ ID NO: 1428, SEQ ID NO: 1432, SEQ ID NO: 1442, SEQ ID NO: 1446, SEQ ID NO: 1456, SEQ ID NO: 1460, SEQ ID NO: 1470, SEQ ID NO: 1474, SEQ ID NO: 1484, SEQ ID NO: 1488, SEQ ID NO: 1498, SEQ ID NO: 1502, SEQ ID NO: 1512, SEQ ID NO: 1516, SEQ ID NO: 1526, SEQ ID NO: 1530, SEQ ID NO: 1540, SEQ ID NO: 1544, SEQ ID NO: 1554, SEQ ID NO: 1558, SEQ ID NO: 1568, and SEQ ID NO: 1572;
[0400] a peptide linker having the amino acid sequence depicted in SEQ ID NO: 777;
[0401] a polypeptide having an amino acid sequence selected from the group consisting of SEQ ID NO: 834, SEQ ID NO: 843, SEQ ID NO: 852, SEQ ID NO: 861, SEQ ID NO: 870, SEQ ID NO: 879, SEQ ID NO: 888, SEQ ID NO: 897, SEQ ID NO: 906, SEQ ID NO: 915, and SEQ ID NO: 918 followed by a serine residue at the C-terminus; and
[0402] a polypeptide having the amino acid sequence depicted in SEQ ID NO: 817;

[0403] (e) a polypeptide comprising in the following order starting from the N-terminus:
[0404] a polypeptide having an amino acid sequence selected from the group consisting of SEQ ID NO: 833, SEQ ID NO: 842, SEQ ID NO: 851, SEQ ID NO: 860, SEQ ID NO: 869, SEQ ID NO: 878, SEQ ID NO: 887, SEQ ID NO: 896, SEQ ID NO: 905, SEQ ID NO: 914, and SEQ ID NO: 917;
[0405] a peptide linker having the amino acid sequence depicted in SEQ ID NO: 777;
[0406] a polypeptide having an amino acid sequence selected from the group consisting of SEQ ID NO: 8, SEQ ID NO: 18, SEQ ID NO: 28, SEQ ID NO: 38, SEQ ID NO: 48, SEQ ID NO: 58, SEQ ID NO: 68, SEQ ID NO: 78, SEQ ID NO: 88, SEQ ID NO: 98, SEQ ID NO: 108, SEQ ID NO: 118, SEQ ID NO: 128, SEQ ID NO: 138, SEQ ID NO: 148, SEQ ID NO: 158, SEQ ID NO: 168, SEQ ID NO: 178, SEQ ID NO: 188, SEQ ID NO: 198, SEQ ID NO: 208, SEQ ID NO: 218, SEQ ID NO: 228, SEQ ID NO: 238, SEQ ID NO: 248, SEQ ID NO: 258, SEQ ID NO: 268, SEQ ID NO: 278, SEQ ID NO: 288, SEQ ID NO: 298, SEQ ID NO: 308, SEQ ID NO: 318, SEQ ID NO: 328, SEQ ID NO: 338, SEQ ID NO: 348, SEQ ID NO: 358, SEQ ID NO: 368, SEQ ID NO: 378, SEQ ID NO: 388, SEQ ID NO: 398, SEQ ID NO: 408, SEQ ID NO: 418, SEQ ID NO: 428, SEQ ID NO: 438, SEQ ID NO: 448, SEQ ID NO: 458, SEQ ID NO: 468, SEQ ID NO: 478, SEQ ID NO: 488, SEQ ID NO: 498, SEQ ID NO: 508, SEQ ID NO: 518, SEQ ID NO: 528, SEQ ID NO: 538, SEQ ID NO: 548, SEQ ID NO: 558, SEQ ID NO: 568, SEQ ID NO: 578, SEQ ID NO: 588, SEQ ID NO: 598, SEQ ID NO: 608, SEQ ID NO: 618, SEQ ID NO: 628, SEQ ID NO: 638, SEQ ID NO: 648, SEQ ID NO: 658, SEQ ID NO: 668, SEQ ID NO: 678, SEQ ID NO: 688, SEQ ID NO: 698, SEQ ID NO: 708, SEQ ID NO: 718, SEQ ID NO: 728, SEQ ID NO: 738, SEQ ID NO: 921, SEQ ID NO: 925, SEQ ID NO: 929, SEQ ID NO: 933, SEQ ID NO: 937, SEQ ID NO: 941, SEQ ID NO: 945, SEQ ID NO: 949, SEQ ID NO: 953, SEQ ID NO: 957, SEQ ID NO: 961, SEQ ID NO: 965, SEQ ID NO: 969, SEQ ID NO: 973, SEQ ID NO: 977, SEQ ID NO: 981, SEQ ID NO: 985, SEQ ID NO: 989, SEQ ID NO: 993, SEQ ID NO: 997, SEQ ID NO: 1001, SEQ ID NO: 1005, SEQ ID NO: 1009, SEQ ID NO: 1013, SEQ ID NO: 1017, SEQ ID NO: 1021, SEQ ID NO: 1025, SEQ ID NO: 1029, SEQ ID NO: 1033, SEQ ID NO: 1037, SEQ ID NO: 1041, SEQ ID NO: 1051, SEQ ID NO: 1055, SEQ ID NO: 1065, SEQ ID NO: 1069, SEQ ID NO: 1079, SEQ ID NO: 1083, SEQ ID NO: 1093, SEQ ID NO: 1097, SEQ ID NO: 1107, SEQ ID NO: 1111, SEQ ID NO: 1121, SEQ ID NO: 1125, SEQ ID NO: 1135, SEQ ID NO: 1139, SEQ ID NO: 1149, SEQ ID NO: 1153, SEQ ID NO: 1163, SEQ ID NO: 1167, SEQ ID NO: 1177, SEQ ID NO: 1181, SEQ ID NO: 1191, SEQ ID NO: 1195, SEQ ID NO: 1205, SEQ ID NO: 1209, SEQ ID NO: 1219, SEQ ID NO: 1223, SEQ ID NO: 1233, SEQ ID NO: 1237, SEQ ID NO: 1247, SEQ ID NO: 1251, SEQ ID NO: 1261, SEQ ID NO: 1265, SEQ ID NO: 1275, SEQ ID NO: 1279, SEQ ID NO: 1289, SEQ ID NO: 1293, SEQ ID NO: 1303, SEQ ID NO: 1307, SEQ ID NO: 1317, SEQ ID NO: 1321, SEQ ID NO: 1331, SEQ ID NO: 1335, SEQ ID NO: 1345, SEQ ID NO: 1349, SEQ ID NO: 1359, SEQ ID NO: 1363, SEQ ID NO: 1373, SEQ ID NO: 1377, SEQ ID NO: 1387, SEQ ID NO: 1391, SEQ ID NO: 1401, SEQ ID NO: 1405, SEQ ID NO: 1415, SEQ ID NO: 1419, SEQ ID NO: 1429, SEQ ID NO: 1433, SEQ ID NO: 1443, SEQ ID NO: 1447, SEQ ID NO: 1457, SEQ ID NO: 1461, SEQ ID NO: 1471, SEQ ID NO: 1475, SEQ ID NO: 1485, SEQ ID NO: 1489, SEQ ID NO: 1499, SEQ ID NO: 1503, SEQ ID NO: 1513, SEQ ID NO: 1517, SEQ ID NO: 1527, SEQ ID NO: 1531, SEQ ID NO: 1541, SEQ ID NO: 1545, SEQ ID NO: 1555, SEQ ID NO: 1559, SEQ ID NO: 1569, and SEQ ID NO: 1573; and
[0407] a polypeptide having the amino acid sequence depicted in SEQ ID NO: 818; and
[0408] a polypeptide comprising in the following order starting from the N-terminus:
[0409] a polypeptide having an amino acid sequence selected from the group consisting of SEQ ID NO: 7, SEQ ID NO: 17, SEQ ID NO: 27, SEQ ID NO: 37, SEQ ID NO: 47, SEQ ID NO: 57, SEQ ID NO: 67, SEQ ID NO: 77, SEQ ID NO: 87, SEQ ID NO: 97, SEQ ID NO: 107, SEQ ID NO: 117, SEQ ID NO: 127, SEQ ID NO: 137, SEQ ID NO: 147, SEQ ID NO: 157, SEQ ID NO: 167, SEQ ID NO: 177, SEQ ID NO: 187, SEQ ID NO: 197, SEQ ID NO: 207, SEQ ID NO: 217, SEQ ID NO: 227, SEQ ID NO: 237, SEQ ID NO: 247, SEQ ID NO: 257, SEQ ID NO: 267, SEQ ID NO: 277, SEQ ID NO: 287, SEQ ID NO: 297, SEQ ID NO: 307, SEQ ID NO: 317, SEQ ID NO: 327, SEQ ID NO: 337, SEQ ID NO: 347, SEQ ID NO: 357, SEQ ID NO: 367, SEQ ID NO: 377, SEQ ID NO: 387, SEQ ID NO: 397, SEQ ID NO: 407, SEQ ID NO: 417, SEQ ID NO: 427, SEQ ID NO: 437, SEQ ID NO: 447, SEQ ID NO: 457, SEQ ID NO: 467, SEQ ID NO: 477, SEQ ID NO: 487, SEQ ID NO: 497, SEQ ID NO: 507, SEQ ID NO: 517, SEQ ID NO: 527, SEQ ID NO: 537, SEQ ID NO: 547, SEQ ID NO: 557, SEQ ID NO: 567, SEQ ID NO: 577, SEQ ID NO: 587, SEQ ID NO: 597, SEQ ID NO: 607, SEQ ID NO: 617, SEQ ID NO: 627, SEQ ID NO: 637, SEQ ID NO: 647, SEQ ID NO: 657, SEQ ID NO: 667, SEQ ID NO: 677, SEQ ID NO: 687, SEQ ID NO: 697, SEQ ID NO: 707, SEQ ID NO: 717, SEQ ID NO: 727, SEQ ID NO: 737; SEQ ID NO: 920, SEQ ID NO: 924, SEQ ID NO: 928, SEQ ID NO: 932, SEQ ID NO: 936, SEQ ID NO: 940, SEQ ID NO: 944, SEQ ID NO: 948, SEQ ID NO: 952, SEQ ID NO: 956, SEQ ID NO: 960, SEQ ID NO: 964, SEQ ID NO: 968, SEQ ID NO: 972, SEQ ID NO: 976, SEQ ID NO: 980, SEQ ID NO: 984, SEQ ID NO: 988, SEQ ID NO: 992, SEQ ID NO: 996, SEQ ID NO: 1000, SEQ ID NO: 1004, SEQ ID NO: 1008, SEQ ID NO: 1012, SEQ ID NO: 1016, SEQ ID NO: 1020, SEQ ID NO: 1024, SEQ ID NO: 1028, SEQ ID NO: 1032, SEQ ID NO: 1036, SEQ ID NO: 1040, SEQ ID NO: 1050, SEQ ID NO: 1054, SEQ ID NO: 1064, SEQ ID NO: 1068, SEQ ID NO: 1078, SEQ ID NO: 1082, SEQ ID NO: 1092, SEQ ID NO: 1096, SEQ ID NO: 1106, SEQ ID NO: 1110, SEQ ID NO: 1120, SEQ ID NO: 1124, SEQ ID NO: 1134, SEQ ID NO: 1138, SEQ ID NO: 1148, SEQ ID NO: 1152, SEQ ID NO: 1162, SEQ ID NO: 1166, SEQ ID NO: 1176, SEQ ID NO: 1180, SEQ ID NO: 1190, SEQ ID NO: 1194, SEQ ID NO: 1204, SEQ ID NO: 1208, SEQ ID NO: 1218, SEQ ID NO: 1222, SEQ ID NO: 1232, SEQ ID NO: 1236, SEQ ID NO: 1246, SEQ ID NO: 1250, SEQ ID NO: 1260, SEQ ID NO: 1264, SEQ ID NO: 1274, SEQ ID NO: 1278, SEQ ID NO: 1288, SEQ ID NO: 1292, SEQ ID NO: 1302, SEQ ID NO: 1306, SEQ ID NO: 1316, SEQ ID NO: 1320, SEQ ID NO: 1330, SEQ ID NO: 1334, SEQ ID NO: 1344, SEQ ID NO: 1348, SEQ ID NO: 1358, SEQ ID NO: 1362, SEQ ID NO: 1372, SEQ ID NO: 1376, SEQ ID NO: 1386, SEQ ID NO: 1390, SEQ ID NO: 1400, SEQ ID NO: 1404, SEQ ID NO: 1414, SEQ ID NO: 1418, SEQ ID NO: 1428, SEQ ID NO: 1432, SEQ ID NO: 1442, SEQ ID NO: 1446, SEQ ID NO: 1456, SEQ ID NO: 1460, SEQ ID NO: 1470, SEQ ID NO: 1474, SEQ ID NO: 1484, SEQ ID NO: 1488, SEQ ID NO: 1498, SEQ ID NO: 1502, SEQ ID NO: 1512, SEQ ID NO: 1516, SEQ ID NO: 1526, SEQ ID NO: 1530, SEQ ID NO: 1540, SEQ ID NO: 1544, SEQ ID NO: 1554, SEQ ID NO: 1558, SEQ ID NO: 1568, and SEQ ID NO: 1572;
[0410] a peptide linker having the amino acid sequence depicted in SEQ ID NO: 777;
[0411] a polypeptide having an amino acid sequence selected from the group consisting of SEQ ID NO: 834, SEQ ID NO: 843, SEQ ID NO: 852, SEQ ID NO: 861, SEQ ID NO: 870, SEQ ID NO: 879, SEQ ID NO: 888, SEQ ID NO: 897, SEQ ID NO: 906, SEQ ID NO: 915, and SEQ ID NO: 918 followed by a serine residue at the C-terminus; and
[0412] a polypeptide having the amino acid sequence depicted in SEQ ID NO: 819;

[0413] (f) a polypeptide comprising in the following order starting from the N-terminus:
[0414] a polypeptide having an amino acid sequence selected from the group consisting of SEQ ID NO: 9, SEQ ID NO: 19, SEQ ID NO: 29, SEQ ID NO: 39, SEQ ID NO: 49, SEQ ID NO: 59, SEQ ID NO: 69, SEQ ID NO: 79, SEQ ID NO: 89, SEQ ID NO: 99, SEQ ID NO: 109, SEQ ID NO: 119, SEQ ID NO: 129, SEQ ID NO: 139, SEQ ID NO: 149, SEQ ID NO: 159, SEQ ID NO: 169, SEQ ID NO: 179, SEQ ID NO: 189, SEQ ID NO: 199, SEQ ID NO: 209, SEQ ID NO: 219, SEQ ID NO: 229, SEQ ID NO: 239, SEQ ID NO: 249, SEQ ID NO: 259, SEQ ID NO: 269, SEQ ID NO: 279, SEQ ID NO: 289, SEQ ID NO: 299, SEQ ID NO: 309, SEQ ID NO: 319, SEQ ID NO: 329, SEQ ID NO: 339, SEQ ID NO: 349, SEQ ID NO: 359, SEQ ID NO: 369, SEQ ID NO: 379, SEQ ID NO: 389, SEQ ID NO: 399, SEQ ID NO: 409, SEQ ID NO: 419, SEQ ID NO: 429, SEQ ID NO: 439, SEQ ID NO: 449, SEQ ID NO: 459, SEQ ID NO: 469, SEQ ID NO: 479, SEQ ID NO: 489, SEQ ID NO: 499, SEQ ID NO: 509, SEQ ID NO: 519, SEQ ID NO: 529, SEQ ID NO: 539, SEQ ID NO: 549, SEQ ID NO: 559, SEQ ID NO: 569, SEQ ID NO: 579, SEQ ID NO: 589, SEQ ID NO: 599, SEQ ID NO: 609, SEQ ID NO: 619, SEQ ID NO: 629, SEQ ID NO: 639, SEQ ID NO: 649, SEQ ID NO: 659, SEQ ID NO: 669, SEQ ID NO: 679, SEQ ID NO: 689, SEQ ID NO: 699, SEQ ID NO: 709, SEQ ID NO: 719, SEQ ID NO: 729, SEQ ID NO: 739, SEQ ID NO: 922, SEQ ID NO: 926, SEQ ID NO: 930, SEQ ID NO: 934, SEQ ID NO: 938, SEQ ID NO: 942, SEQ ID NO: 946, SEQ ID NO: 950, SEQ ID NO: 954, SEQ ID NO: 958, SEQ ID NO: 962, SEQ ID NO: 966, SEQ ID NO: 970, SEQ ID NO: 974, SEQ ID NO: 978, SEQ ID NO: 982, SEQ ID NO: 986, SEQ ID NO: 990, SEQ ID NO: 994, SEQ ID NO: 998, SEQ ID NO: 1002, SEQ ID NO: 1006, SEQ ID NO: 1010, SEQ ID NO: 1014, SEQ ID NO: 1018, SEQ ID NO: 1022, SEQ ID NO: 1026, SEQ ID NO: 1030, SEQ ID NO: 1034, SEQ ID NO: 1038, SEQ ID NO: 1042, SEQ ID NO: 1052, SEQ ID NO: 1056, SEQ ID NO: 1066, SEQ ID NO: 1070, SEQ ID NO: 1080, SEQ ID NO: 1084, SEQ ID NO: 1094, SEQ ID NO: 1098, SEQ ID NO: 1108, SEQ ID NO: 1112, SEQ ID NO: 1122, SEQ ID NO: 1126, SEQ ID NO: 1136, SEQ ID NO: 1140, SEQ ID NO: 1150, SEQ ID NO: 1154, SEQ ID NO: 1164, SEQ ID NO: 1168, SEQ ID NO: 1178, SEQ ID NO: 1182, SEQ ID NO: 1192, SEQ ID NO: 1196, SEQ ID NO: 1206, SEQ ID NO: 1210, SEQ ID NO: 1220, SEQ ID NO: 1224, SEQ ID NO: 1234, SEQ ID NO: 1238, SEQ ID NO: 1248, SEQ ID NO: 1252, SEQ ID NO: 1262, SEQ ID NO: 1266, SEQ ID NO: 1276, SEQ ID NO: 1280, SEQ ID NO: 1290, SEQ ID NO: 1294, SEQ ID NO: 1304, SEQ ID NO: 1308, SEQ ID NO: 1318, SEQ ID NO: 1322, SEQ ID NO: 1332, SEQ ID NO: 1336, SEQ ID NO: 1346, SEQ ID NO: 1350, SEQ ID NO: 1360, SEQ ID NO: 1364, SEQ ID NO: 1374, SEQ ID NO: 1378, SEQ ID NO: 1388, SEQ ID NO: 1392, SEQ ID NO: 1402, SEQ ID NO: 1406, SEQ ID NO: 1416, SEQ ID NO: 1420, SEQ ID NO: 1430, SEQ ID NO: 1434, SEQ ID NO: 1444, SEQ ID NO: 1448, SEQ ID NO: 1458, SEQ ID NO: 1462, SEQ ID NO: 1472, SEQ ID NO: 1476, SEQ ID NO: 1486, SEQ ID NO: 1490, SEQ ID NO: 1500, SEQ ID NO: 1504, SEQ ID NO: 1514, SEQ ID NO: 1518, SEQ ID NO: 1528, SEQ ID NO: 1532, SEQ ID NO: 1542, SEQ ID NO: 1546, SEQ ID NO: 1556, SEQ ID NO: 1560, SEQ ID NO: 1570, and SEQ ID NO: 1574;
[0415] a peptide linker having an amino acid sequence selected from the group consisting of SEQ ID NOs: 770-778;
[0416] a polypeptide having an amino acid sequence selected from the group consisting of SEQ ID NO: 835, SEQ ID NO: 844, SEQ ID NO: 853, SEQ ID NO: 862, SEQ ID NO: 871, SEQ ID NO: 880, SEQ ID NO: 889, SEQ ID NO: 898, SEQ ID NO: 907, SEQ ID NO: 916, and SEQ ID NO: 919;
[0417] a polypeptide having the amino acid sequence depicted in SEQ ID NO: 820; and
[0418] a polypeptide having the amino acid sequence depicted in SEQ ID NO: 821;

[0419] (g) a polypeptide comprising in the following order starting from the N-terminus:
[0420] a polypeptide having an amino acid sequence selected from the group consisting of SEQ ID NO: 9, SEQ ID NO: 19, SEQ ID NO: 29, SEQ ID NO: 39, SEQ ID NO: 49, SEQ ID NO: 59, SEQ ID NO: 69, SEQ ID NO: 79, SEQ ID NO: 89, SEQ ID NO: 99, SEQ ID NO: 109, SEQ ID NO: 119, SEQ ID NO: 129, SEQ ID NO: 139, SEQ ID NO: 149, SEQ ID NO: 159, SEQ ID NO: 169, SEQ ID NO: 179, SEQ ID NO: 189, SEQ ID NO: 199, SEQ ID NO: 209, SEQ ID NO: 219, SEQ ID NO: 229, SEQ ID NO: 239, SEQ ID NO: 249, SEQ ID NO: 259, SEQ ID NO: 269, SEQ ID NO: 279, SEQ ID NO: 289, SEQ ID NO: 299, SEQ ID NO: 309, SEQ ID NO: 319, SEQ ID NO: 329, SEQ ID NO: 339, SEQ ID NO: 349, SEQ ID NO: 359, SEQ ID NO: 369, SEQ ID NO: 379, SEQ ID NO: 389, SEQ ID NO: 399, SEQ ID NO: 409, SEQ ID NO: 419, SEQ ID NO: 429, SEQ ID NO: 439, SEQ ID NO: 449, SEQ ID NO: 459, SEQ ID NO: 469, SEQ ID NO: 479, SEQ ID NO: 489, SEQ ID NO: 499, SEQ ID NO: 509, SEQ ID NO: 519, SEQ ID NO: 529, SEQ ID NO: 539, SEQ ID NO: 549, SEQ ID NO: 559, SEQ ID NO: 569, SEQ ID NO: 579, SEQ ID NO: 589, SEQ ID NO: 599, SEQ ID NO: 609, SEQ ID NO: 619, SEQ ID NO: 629, SEQ ID NO: 639, SEQ ID NO: 649, SEQ ID NO: 659, SEQ ID NO: 669, SEQ ID NO: 679, SEQ ID NO: 689, SEQ ID NO: 699, SEQ ID NO: 709, SEQ ID NO: 719, SEQ ID NO: 729, SEQ ID NO: 739, SEQ ID NO: 922, SEQ ID NO: 926, SEQ ID NO: 930, SEQ ID NO: 934, SEQ ID NO: 938, SEQ ID NO: 942, SEQ ID NO: 946, SEQ ID NO: 950, SEQ ID NO: 954, SEQ ID NO: 958, SEQ ID NO: 962, SEQ ID NO: 966, SEQ ID NO: 970, SEQ ID NO: 974, SEQ ID NO: 978, SEQ ID NO: 982, SEQ ID NO: 986, SEQ ID NO: 990, SEQ ID NO: 994, SEQ ID NO: 998, SEQ ID NO: 1002, SEQ ID NO: 1006, SEQ ID NO: 1010, SEQ ID NO: 1014, SEQ ID NO: 1018, SEQ ID NO: 1022, SEQ ID NO: 1026, SEQ ID NO: 1030, SEQ ID NO: 1034, SEQ ID NO: 1038, SEQ ID NO: 1042, SEQ ID NO: 1052, SEQ ID NO: 1056, SEQ ID NO: 1066, SEQ ID NO: 1070, SEQ ID NO: 1080, SEQ ID NO: 1084, SEQ ID NO: 1094, SEQ ID NO: 1098, SEQ ID NO: 1108, SEQ ID NO: 1112, SEQ ID NO: 1122, SEQ ID NO: 1126, SEQ ID NO: 1136, SEQ ID NO: 1140, SEQ ID NO: 1150, SEQ ID NO: 1154, SEQ ID NO: 1164, SEQ ID NO: 1168, SEQ ID NO: 1178, SEQ ID NO: 1182, SEQ ID NO: 1192, SEQ ID NO: 1196, SEQ ID NO: 1206, SEQ ID NO: 1210, SEQ ID NO: 1220, SEQ ID NO: 1224, SEQ ID NO: 1234, SEQ ID NO: 1238, SEQ ID NO: 1248, SEQ ID NO: 1252, SEQ ID NO: 1262, SEQ ID NO: 1266, SEQ ID NO: 1276, SEQ ID NO: 1280, SEQ ID NO: 1290, SEQ ID NO: 1294, SEQ ID NO: 1304, SEQ ID NO: 1308, SEQ ID NO: 1318, SEQ ID NO: 1322, SEQ ID NO: 1332, SEQ ID NO: 1336, SEQ ID NO: 1346, SEQ ID NO: 1350, SEQ ID NO: 1360, SEQ ID NO: 1364, SEQ ID NO: 1374, SEQ ID NO: 1378, SEQ ID NO: 1388, SEQ ID NO: 1392, SEQ ID NO: 1402, SEQ ID NO: 1406, SEQ ID NO: 1416, SEQ ID NO: 1420, SEQ ID NO: 1430, SEQ ID NO: 1434, SEQ ID NO: 1444, SEQ ID NO: 1448, SEQ ID NO: 1458, SEQ ID NO: 1462, SEQ ID NO: 1472, SEQ ID NO: 1476, SEQ ID NO: 1486, SEQ ID NO: 1490, SEQ ID NO: 1500, SEQ ID NO: 1504, SEQ ID NO: 1514, SEQ ID NO: 1518, SEQ ID NO: 1528, SEQ ID NO: 1532, SEQ ID NO: 1542, SEQ ID NO: 1546, SEQ ID NO: 1556, SEQ ID NO: 1560, SEQ ID NO: 1570, and SEQ ID NO: 1574; and
[0421] a polypeptide having the amino acid sequence depicted in SEQ ID NO: 822; and
[0422] a polypeptide comprising in the following order starting from the N-terminus:
[0423] a polypeptide having an amino acid sequence selected from the group consisting of SEQ ID NO: 835, SEQ ID NO: 844, SEQ ID NO: 853, SEQ ID NO: 862, SEQ ID NO: 871, SEQ ID NO: 880, SEQ ID NO: 889, SEQ ID NO: 898, SEQ ID NO: 907, SEQ ID NO: 916, and SEQ ID NO: 919; and
[0424] a polypeptide having the amino acid sequence depicted in SEQ ID NO: 823;

[0425] (h) a polypeptide comprising in the following order starting from the N-terminus:
[0426] a polypeptide having an amino acid sequence selected from the group consisting of SEQ ID NO: 9, SEQ ID NO: 19, SEQ ID NO: 29, SEQ ID NO: 39, SEQ ID NO: 49, SEQ ID NO: 59, SEQ ID NO: 69, SEQ ID NO: 79, SEQ ID NO: 89, SEQ ID NO: 99, SEQ ID NO: 109, SEQ ID NO: 119, SEQ ID NO: 129, SEQ ID NO: 139, SEQ ID NO: 149, SEQ ID NO: 159, SEQ ID NO: 169, SEQ ID NO: 179, SEQ ID NO: 189, SEQ ID NO: 199, SEQ ID NO: 209, SEQ ID NO: 219, SEQ ID NO: 229, SEQ ID NO: 239, SEQ ID NO: 249, SEQ ID NO: 259, SEQ ID NO: 269, SEQ ID NO: 279, SEQ ID NO: 289, SEQ ID NO: 299, SEQ ID NO: 309, SEQ ID NO: 319, SEQ ID NO: 329, SEQ ID NO: 339, SEQ ID NO: 349, SEQ ID NO: 359, SEQ ID NO: 369, SEQ ID NO: 379, SEQ ID NO: 389, SEQ ID NO: 399, SEQ ID NO: 409, SEQ ID NO: 419, SEQ ID NO: 429, SEQ ID NO: 439, SEQ ID NO: 449, SEQ ID NO: 459, SEQ ID NO: 469, SEQ ID NO: 479, SEQ ID NO: 489, SEQ ID NO: 499, SEQ ID NO: 509, SEQ ID NO: 519, SEQ ID NO: 529, SEQ ID NO: 539, SEQ ID NO: 549, SEQ ID NO: 559, SEQ ID NO: 569, SEQ ID NO: 579, SEQ ID NO: 589, SEQ ID NO: 599, SEQ ID NO: 609, SEQ ID NO: 619, SEQ ID NO: 629, SEQ ID NO: 639, SEQ ID NO: 649, SEQ ID NO: 659, SEQ ID NO: 669, SEQ ID NO: 679, SEQ ID NO: 689, SEQ ID NO: 699, SEQ ID NO: 709, SEQ ID NO: 719, SEQ ID NO: 729, SEQ ID NO: 739, SEQ ID NO: 922, SEQ ID NO: 926, SEQ ID NO: 930, SEQ ID NO: 934, SEQ ID NO: 938, SEQ ID NO: 942, SEQ ID NO: 946, SEQ ID NO: 950, SEQ ID NO: 954, SEQ ID NO: 958, SEQ ID NO: 962, SEQ ID NO: 966, SEQ ID NO: 970, SEQ ID NO: 974, SEQ ID NO: 978, SEQ ID NO: 982, SEQ ID NO: 986, SEQ ID NO: 990, SEQ ID NO: 994, SEQ ID NO: 998, SEQ ID NO: 1002, SEQ ID NO: 1006, SEQ ID NO: 1010, SEQ ID NO: 1014, SEQ ID NO: 1018, SEQ ID NO: 1022, SEQ ID NO: 1026, SEQ ID NO: 1030, SEQ ID NO: 1034, SEQ ID NO: 1038, SEQ ID NO: 1042, SEQ ID NO: 1052, SEQ ID NO: 1056, SEQ ID NO: 1066, SEQ ID NO: 1070, SEQ ID NO: 1080, SEQ ID NO: 1084, SEQ ID NO: 1094, SEQ ID NO: 1098, SEQ ID NO: 1108, SEQ ID NO: 1112, SEQ ID NO: 1122, SEQ ID NO: 1126, SEQ ID NO: 1136, SEQ ID NO: 1140, SEQ ID NO: 1150, SEQ ID NO: 1154, SEQ ID NO: 1164, SEQ ID NO: 1168, SEQ ID NO: 1178, SEQ ID NO: 1182, SEQ ID NO: 1192, SEQ ID NO: 1196, SEQ ID NO: 1206, SEQ ID NO: 1210, SEQ ID NO: 1220, SEQ ID NO: 1224, SEQ ID NO: 1234, SEQ ID NO: 1238, SEQ ID NO: 1248, SEQ ID NO: 1252, SEQ ID NO: 1262, SEQ ID NO: 1266, SEQ ID NO: 1276, SEQ ID NO: 1280, SEQ ID NO: 1290, SEQ ID NO: 1294, SEQ ID NO: 1304, SEQ ID NO: 1308, SEQ ID NO: 1318, SEQ ID NO: 1322, SEQ ID NO: 1332, SEQ ID NO: 1336, SEQ ID NO: 1346, SEQ ID NO: 1350, SEQ ID NO: 1360, SEQ ID NO: 1364, SEQ ID NO: 1374, SEQ ID NO: 1378, SEQ ID NO: 1388, SEQ ID NO: 1392, SEQ ID NO: 1402, SEQ ID NO: 1406, SEQ ID NO: 1416, SEQ ID NO: 1420, SEQ ID NO: 1430, SEQ ID NO: 1434, SEQ ID NO: 1444, SEQ ID NO: 1448, SEQ ID NO: 1458, SEQ ID NO: 1462, SEQ ID NO: 1472, SEQ ID NO: 1476, SEQ ID NO: 1486, SEQ ID NO: 1490, SEQ ID NO: 1500, SEQ ID NO: 1504, SEQ ID NO: 1514, SEQ ID NO: 1518, SEQ ID NO: 1528, SEQ ID NO: 1532, SEQ ID NO: 1542, SEQ ID NO: 1546, SEQ ID NO: 1556, SEQ ID NO: 1560, SEQ ID NO: 1570, and SEQ ID NO: 1574; and
[0427] a polypeptide having the amino acid sequence depicted in SEQ ID NO: 824; and
[0428] a polypeptide comprising in the following order starting from the N-terminus:
[0429] a polypeptide having an amino acid sequence selected from the group consisting of SEQ ID NO: 835, SEQ ID NO: 844, SEQ ID NO: 853, SEQ ID NO: 862, SEQ ID NO: 871, SEQ ID NO: 880, SEQ ID NO: 889, SEQ ID NO: 898, SEQ ID NO: 907, SEQ ID NO: 916, and SEQ ID NO: 919; and
[0430] a polypeptide having the amino acid sequence depicted in SEQ ID NO: 825; or

[0431] (i) a polypeptide comprising in the following order starting from the N-terminus:
[0432] a polypeptide having an amino acid sequence selected from the group consisting of SEQ ID NO: 9, SEQ ID NO: 19, SEQ ID NO: 29, SEQ ID NO: 39, SEQ ID NO: 49, SEQ ID NO: 59, SEQ ID NO: 69, SEQ ID NO: 79, SEQ ID NO: 89, SEQ ID NO: 99, SEQ ID NO: 109, SEQ ID NO: 119, SEQ ID NO: 129, SEQ ID NO: 139, SEQ ID NO: 149, SEQ ID NO: 159, SEQ ID NO: 169, SEQ ID NO: 179, SEQ ID NO: 189, SEQ ID NO: 199, SEQ ID NO: 209, SEQ ID NO: 219, SEQ ID NO: 229, SEQ ID NO: 239, SEQ ID NO: 249, SEQ ID NO: 259, SEQ ID NO: 269, SEQ ID NO: 279, SEQ ID NO: 289, SEQ ID NO: 299, SEQ ID NO: 309, SEQ ID NO: 319, SEQ ID NO: 329, SEQ ID NO: 339, SEQ ID NO: 349, SEQ ID NO: 359, SEQ ID NO: 369, SEQ ID NO: 379, SEQ ID NO: 389, SEQ ID NO: 399, SEQ ID NO: 409, SEQ ID NO: 419, SEQ ID NO: 429, SEQ ID NO: 439, SEQ ID NO: 449, SEQ ID NO: 459, SEQ ID NO: 469, SEQ ID NO: 479, SEQ ID NO: 489, SEQ ID NO: 499, SEQ ID NO: 509, SEQ ID NO: 519, SEQ ID NO: 529, SEQ ID NO: 539, SEQ ID NO: 549, SEQ ID NO: 559, SEQ ID NO: 569, SEQ ID NO: 579, SEQ ID NO: 589, SEQ ID NO: 599, SEQ ID NO: 609, SEQ ID NO: 619, SEQ ID NO: 629, SEQ ID NO: 639, SEQ ID NO: 649, SEQ ID NO: 659, SEQ ID NO: 669, SEQ ID NO: 679, SEQ ID NO: 689, SEQ ID NO: 699, SEQ ID NO: 709, SEQ ID NO: 719, SEQ ID NO: 729, SEQ ID NO: 739, SEQ ID NO: 922, SEQ ID NO: 926, SEQ ID NO: 930, SEQ ID NO: 934, SEQ ID NO: 938, SEQ ID NO: 942, SEQ ID NO: 946, SEQ ID NO: 950, SEQ ID NO: 954, SEQ ID NO: 958, SEQ ID NO: 962, SEQ ID NO: 966, SEQ ID NO: 970, SEQ ID NO: 974, SEQ ID NO: 978, SEQ ID NO: 982, SEQ ID NO: 986, SEQ ID NO: 990, SEQ ID NO: 994, SEQ ID NO: 998, SEQ ID NO: 1002, SEQ ID NO: 1006, SEQ ID NO: 1010, SEQ ID NO: 1014, SEQ ID NO: 1018, SEQ ID NO: 1022, SEQ ID NO: 1026, SEQ ID NO: 1030, SEQ ID NO: 1034, SEQ ID NO: 1038, SEQ ID NO: 1042, SEQ ID NO: 1052, SEQ ID NO: 1056, SEQ ID NO: 1066, SEQ ID NO: 1070, SEQ ID NO: 1080, SEQ ID NO: 1084, SEQ ID NO: 1094, SEQ ID NO: 1098, SEQ ID NO: 1108, SEQ ID NO: 1112, SEQ ID NO: 1122, SEQ ID NO: 1126, SEQ ID NO: 1136, SEQ ID NO: 1140, SEQ ID NO: 1150, SEQ ID NO: 1154, SEQ ID NO: 1164, SEQ ID NO: 1168, SEQ ID NO: 1178, SEQ ID NO: 1182, SEQ ID NO: 1192, SEQ ID NO: 1196, SEQ ID NO: 1206, SEQ ID NO: 1210, SEQ ID NO: 1220, SEQ ID NO: 1224, SEQ ID NO: 1234, SEQ ID NO: 1238, SEQ ID NO: 1248, SEQ ID NO: 1252, SEQ ID NO: 1262, SEQ ID NO: 1266, SEQ ID NO: 1276, SEQ ID NO: 1280, SEQ ID NO: 1290, SEQ ID NO: 1294, SEQ ID NO: 1304, SEQ ID NO: 1308, SEQ ID NO: 1318, SEQ ID NO: 1322, SEQ ID NO: 1332, SEQ ID NO: 1336, SEQ ID NO: 1346, SEQ ID NO: 1350, SEQ ID NO: 1360, SEQ ID NO: 1364, SEQ ID NO: 1374, SEQ ID NO: 1378, SEQ ID NO: 1388, SEQ ID NO: 1392, SEQ ID NO: 1402, SEQ ID NO: 1406, SEQ ID NO: 1416, SEQ ID NO: 1420, SEQ ID NO: 1430, SEQ ID NO: 1434, SEQ ID NO: 1444, SEQ ID NO: 1448, SEQ ID NO: 1458, SEQ ID NO: 1462, SEQ ID NO: 1472, SEQ ID NO: 1476, SEQ ID NO: 1486, SEQ ID NO: 1490, SEQ ID NO: 1500, SEQ ID NO: 1504, SEQ ID NO: 1514, SEQ ID NO: 1518, SEQ ID NO: 1528, SEQ ID NO: 1532, SEQ ID NO: 1542, SEQ ID NO: 1546, SEQ ID NO: 1556, SEQ ID NO: 1560, SEQ ID NO: 1570, and SEQ ID NO: 1574;
[0433] a peptide linker having an amino acid sequence selected from the group consisting of SEQ ID NOs: 770-778;
[0434] a polypeptide having an amino acid sequence selected from the group consisting of SEQ ID NO: 835, SEQ ID NO: 844, SEQ ID NO: 853, SEQ ID NO: 862, SEQ ID NO: 871, SEQ ID NO: 880, SEQ ID NO: 889, SEQ ID NO: 898, SEQ ID NO: 907, SEQ ID NO: 916, and SEQ ID NO: 919; and
[0435] a polypeptide having the amino acid sequence depicted in SEQ ID NO: 826.

[0436] As described above, several preferred antibody constructs of the invention are modified by fusion with another moiety such as albumin or albumin variants. If these fusion constructs are characterized for their properties, such as in particular their target affinity or cytotoxic activity, the skilled person will be aware that similar fusion constructs or unmodified bispecific antibody constructs can be expected to have similar (or possibly even better) properties. For example, if a bispecific antibody construct fused with albumin has an appreciable or desirable cytotoxic activity or target affinity, it can be expected that the same/similar or even a higher cytotoxic activity/target affinity will be observed for the same construct w/o albumin.

[0437] According to another preferred embodiment, the bispecific antibody construct of the invention comprises (in addition to the two binding domains) a third domain which comprises two polypeptide monomers, each comprising a hinge, a CH2 and a CH3 domain, wherein said two polypeptides (or polypeptide monomers) are fused to each other via a peptide linker. Preferably, said third domain comprises in an N- to C-terminal order: hinge-CH2-CH3-linker-hinge-CH2-CH3. Preferred amino acid sequences for said third domain are depicted in SEQ ID NOs: 1856-1863. Each of said polypeptide monomers preferably has an amino acid sequence that is selected from the group consisting of SEQ ID NOs: 1848-1855, or that is at least 90% identical to those sequences. In another preferred embodiment, the first and second binding domains of the bispecific antibody construct of the invention are fused to the third domain via a peptide linker which is for example selected from the group consisting of SEQ ID NOs: 770, 771, 773, 774, 775, 777 and 778.

[0438] In line with the present invention, a “hinge” is an IgG hinge region. This region can be identified by analogy using the Kabat numbering, see Kabat positions 223-243. In line with the above, the minimal requirement for a “hinge” are the amino acid residues corresponding to the IgG1 sequence stretch of D231 to P243 according to the Kabat numbering. The terms CH2 and CH3 refer to the immunoglobulin heavy chain constant regions 2 and 3. These regions can as well be identified by analogy using the Kabat numbering, see Kabat positions 244-360 for CH2 and Kabat positions 361-478 for CH3. It is understood that there is some variation between the immunoglobulins in terms of their IgG1 Fc region, IgG2 Fc region, IgG3 Fc region, IgG4 Fc region, IgM Fc region, IgA Fc region, IgD Fc region and IgE Fc region (see, e.g., Padlan, Molecular Immunology, 31(3), 169-217 (1993)). The term Fc monomer refers to the last two heavy chain constant regions of IgA, IgD, and IgG, and the last three heavy chain constant regions of IgE and IgM. The Fc monomer can also include the flexible hinge N-terminal to these domains. For IgA and IgM, the Fc monomer may include the J chain. For IgG, the Fc portion comprises immunoglobulin domains CH2 and CH3 and the hinge between the first two domains and CH2. Although the boundaries of the Fc portion of an immunoglobulin may vary, an example for a human IgG heavy chain Fc portion comprising a functional hinge, CH2 and CH3 domain can be defined e.g. to comprise residues D231 (of the hinge domain) to P476 (of the C-terminus of the CH3 domain), or D231 to L476, respectively, for IgG4, wherein the numbering is according to Kabat.

[0439] The antibody construct of the invention may hence comprise in an N- to C-terminal order:
[0440] (a) the first binding domain;
[0441] (b) a peptide linker having an amino acid sequence selected from the group consisting of SEQ ID NOs: 771, 777, and 778;
[0442] (c) the second binding domain;
[0443] (d) a peptide linker having an amino acid sequence selected from the group consisting of SEQ ID NOs: 770, 771, 773, 774, 775, 777 and 778;
[0444] (e) the first polypeptide monomer of the third domain (comprising a hinge, a CH2 and a CH3 domain);
[0445] (f) a peptide linker having an amino acid sequence selected from the group consisting of SEQ ID NOs: 1865, 1866, 1867, and 1868; and
[0446] (g) the second polypeptide monomer of the third domain (comprising a hinge, a CH2 and a CH3 domain).

[0447] It is also preferred that the antibody construct of the invention comprises in an N- to C-terminal order:
[0448] the first binding domain having an amino acid sequence selected from the group consisting of SEQ ID NO: 9, SEQ ID NO: 19, SEQ ID NO: 29, SEQ ID NO: 39, SEQ ID NO: 49, SEQ ID NO: 59, SEQ ID NO: 69, SEQ ID NO: 79, SEQ ID NO: 89, SEQ ID NO: 99, SEQ ID NO: 109, SEQ ID NO: 119, SEQ ID NO: 129, SEQ ID NO: 139, SEQ ID NO: 149, SEQ ID NO: 159, SEQ ID NO: 169, SEQ ID NO: 179, SEQ ID NO: 189, SEQ ID NO: 199, SEQ ID NO: 209, SEQ ID NO: 219, SEQ ID NO: 229, SEQ ID NO: 239, SEQ ID NO: 249, SEQ ID NO: 259, SEQ ID NO: 269, SEQ ID NO: 279, SEQ ID NO: 289, SEQ ID NO: 299, SEQ ID NO: 309, SEQ ID NO: 319, SEQ ID NO: 329, SEQ ID NO: 339, SEQ ID NO: 349, SEQ ID NO: 359, SEQ ID NO: 369, SEQ ID NO: 379, SEQ ID NO: 389, SEQ ID NO: 399, SEQ ID NO: 409, SEQ ID NO: 419, SEQ ID NO: 429, SEQ ID NO: 439, SEQ ID NO: 449, SEQ ID NO: 459, SEQ ID NO: 469, SEQ ID NO: 479, SEQ ID NO: 489, SEQ ID NO: 499, SEQ ID NO: 509, SEQ ID NO: 519, SEQ ID NO: 529, SEQ ID NO: 539, SEQ ID NO: 549, SEQ ID NO: 559, SEQ ID NO: 569, SEQ ID NO: 579, SEQ ID NO: 589, SEQ ID NO: 599, SEQ ID NO: 609, SEQ ID NO: 619, SEQ ID NO: 629, SEQ ID NO: 639, SEQ ID NO: 649, SEQ ID NO: 659, SEQ ID NO: 669, SEQ ID NO: 679, SEQ ID NO: 689, SEQ ID NO: 699, SEQ ID NO: 709, SEQ ID NO: 719, SEQ ID NO: 729, SEQ ID NO: 739, SEQ ID NO: 922, SEQ ID NO: 926, SEQ ID NO: 930, SEQ ID NO: 934, SEQ ID NO: 938, SEQ ID NO: 942, SEQ ID NO: 946, SEQ ID NO: 950, SEQ ID NO: 954, SEQ ID NO: 958, SEQ ID NO: 962, SEQ ID NO: 966, SEQ ID NO: 970, SEQ ID NO: 974, SEQ ID NO: 978, SEQ ID NO: 982, SEQ ID NO: 986, SEQ ID NO: 990, SEQ ID NO: 994, SEQ ID NO: 998, SEQ ID NO: 1002, SEQ ID NO: 1006, SEQ ID NO: 1010, SEQ ID NO: 1014, SEQ ID NO: 1018, SEQ ID NO: 1022, SEQ ID NO: 1026, SEQ ID NO: 1030, SEQ ID NO: 1034, SEQ ID NO: 1038, SEQ ID NO: 1042, SEQ ID NO: 1052, SEQ ID NO: 1056, SEQ ID NO: 1066, SEQ ID NO: 1070, SEQ ID NO: 1080, SEQ ID NO: 1084, SEQ ID NO: 1094, SEQ ID NO: 1098, SEQ ID NO: 1108, SEQ ID NO: 1112, SEQ ID NO: 1122, SEQ ID NO: 1126, SEQ ID NO: 1136, SEQ ID NO: 1140, SEQ ID NO: 1150, SEQ ID NO: 1154, SEQ ID NO: 1164, SEQ ID NO: 1168, SEQ ID NO: 1178, SEQ ID NO: 1182, SEQ ID NO: 1192, SEQ ID NO: 1196, SEQ ID NO: 1206, SEQ ID NO: 1210, SEQ ID NO: 1220, SEQ ID NO: 1224, SEQ ID NO: 1234, SEQ ID NO: 1238, SEQ ID NO: 1248, SEQ ID NO: 1252, SEQ ID NO: 1262, SEQ ID NO: 1266, SEQ ID NO: 1276, SEQ ID NO: 1280, SEQ ID NO: 1290, SEQ ID NO: 1294, SEQ ID NO: 1304, SEQ ID NO: 1308, SEQ ID NO: 1318, SEQ ID NO: 1322, SEQ ID NO: 1332, SEQ ID NO: 1336, SEQ ID NO: 1346, SEQ ID NO: 1350, SEQ ID NO: 1360, SEQ ID NO: 1364, SEQ ID NO: 1374, SEQ ID NO: 1378, SEQ ID NO: 1388, SEQ ID NO: 1392, SEQ ID NO: 1402, SEQ ID NO: 1406, SEQ ID NO: 1416, SEQ ID NO: 1420, SEQ ID NO: 1430, SEQ ID NO: 1434, SEQ ID NO: 1444, SEQ ID NO: 1448, SEQ ID NO: 1458, SEQ ID NO: 1462, SEQ ID NO: 1472, SEQ ID NO: 1476, SEQ ID NO: 1486, SEQ ID NO: 1490, SEQ ID NO: 1500, SEQ ID NO: 1504, SEQ ID NO: 1514, SEQ ID NO: 1518, SEQ ID NO: 1528, SEQ ID NO: 1532, SEQ ID NO: 1542, SEQ ID NO: 1546, SEQ ID NO: 1556, SEQ ID NO: 1560, SEQ ID NO: 1570, and SEQ ID NO: 1574;
[0449] a peptide linker having an amino acid sequence selected from the group consisting of SEQ ID NOs: 771, 777, and 778;
[0450] the second binding domain having an amino acid sequence selected from the group consisting of SEQ ID NO: 835, SEQ ID NO: 844, SEQ ID NO: 853, SEQ ID NO: 862, SEQ ID NO: 871, SEQ ID NO: 880, SEQ ID NO: 889, SEQ ID NO: 898, SEQ ID NO: 907, SEQ ID NO: 916, and SEQ ID NO: 919;
[0451] a peptide linker having an amino acid sequence selected from the group consisting of SEQ ID NOs: 770, 771, 773, 774, 775, 777 and 778; and
[0452] the third domain having an amino acid sequence selected from the group consisting of SEQ ID NOs: 1856-1863.

[0453] Hence, in a preferred embodiment, the antibody construct of the present invention comprises or consists of a polypeptide selected from the group consisting of those depicted in SEQ ID NOs: 1576-1847. Preferred are those polypeptides selected from the group consisting of those depicted in SEQ ID NO: 1696, SEQ ID NO: 1702, SEQ ID NO: 1710, SEQ ID NO: 1714, SEQ ID NO: 1716, SEQ ID NO: 1720, SEQ ID NO: 1722, SEQ ID NO: 1724, SEQ ID NO: 1726, SEQ ID NO: 1728, SEQ ID NO: 1738, SEQ ID NO: 1740, SEQ ID NO: 1742, SEQ ID NO: 1750, and SEQ ID NO: 1752.

[0454] Covalent modifications of the antibody constructs are also included within the scope of this invention, and are generally, but not always, done post-translationally. For example, several types of covalent modifications of the antibody construct are introduced into the molecule by reacting specific amino acid residues of the antibody construct with an organic derivatizing agent that is capable of reacting with selected side chains or the N- or C-terminal residues.

[0455] Cysteinyl residues most commonly are reacted with α-haloacetates (and corresponding amines), such as chloroacetic acid or chloroacetamide, to give carboxymethyl or carboxyamidomethyl derivatives. Cysteinyl residues also are derivatized by reaction with bromotrifluoroacetone, α-bromo-β-(5-imidozoyl)propionic acid, chloroacetyl phosphate, N-alkylmaleimides, 3-nitro-2-pyridyl disulfide, methyl 2-pyridyl disulfide, p-chloromercuribenzoate, 2-chloromercuri-4-nitrophenol, or chloro-7-nitrobenzo-2-oxa-1,3-diazole.

[0456] Histidyl residues are derivatized by reaction with diethylpyrocarbonate at pH 5.5-7.0 because this agent is relatively specific for the histidyl side chain. Para-bromophenacyl bromide also is useful; the reaction is preferably performed in 0.1 M sodium cacodylate at pH 6.0. Lysinyl and amino terminal residues are reacted with succinic or other carboxylic acid anhydrides. Derivatization with these agents has the effect of reversing the charge of the lysinyl residues. Other suitable reagents for derivatizing alpha-amino-containing residues include imidoesters such as methyl picolinimidate; pyridoxal phosphate; pyridoxal; chloroborohydride; trinitrobenzenesulfonic acid; O-methylisourea; 2,4-pentanedione; and transaminase-catalyzed reaction with glyoxylate.

[0457] Arginyl residues are modified by reaction with one or several conventional reagents, among them phenylglyoxal, 2,3-butanedione, 1,2-cyclohexanedione, and ninhydrin. Derivatization of arginine residues requires that the reaction be performed in alkaline conditions because of the high pKa of the guanidine functional group. Furthermore, these reagents may react with the groups of lysine as well as the arginine epsilon-amino group.

[0458] The specific modification of tyrosyl residues may be made, with particular interest in introducing spectral labels into tyrosyl residues by reaction with aromatic diazonium compounds or tetranitromethane. Most commonly, N-acetylimidizole and tetranitromethane are used to form O-acetyl tyrosyl species and 3-nitro derivatives, respectively. Tyrosyl residues are iodinated using ¹²⁵I or ¹³¹I to prepare labeled proteins for use in radioimmunoassay, the chloramine T method described above being suitable.

[0459] Carboxyl side groups (aspartyl or glutamyl) are selectively modified by reaction with carbodiimides (R′—N═C═N—R′), where R and R′ are optionally different alkyl groups, such as 1-cyclohexyl-3-(2-morpholinyl-4-ethyl) carbodiimide or 1-ethyl-3-(4-azonia-4,4-dimethylpentyl) carbodiimide. Furthermore, aspartyl and glutamyl residues are converted to asparaginyl and glutaminyl residues by reaction with ammonium ions.

[0460] Derivatization with bifunctional agents is useful for crosslinking the antibody constructs of the present invention to a water-insoluble support matrix or surface for use in a variety of methods. Commonly used crosslinking agents include, e.g., 1,1-bis(diazoacetyl)-2-phenylethane, glutaraldehyde, N-hydroxysuccinimide esters, for example, esters with 4-azidosalicylic acid, homobifunctional imidoesters, including disuccinimidyl esters such as 3,3′-dithiobis(succinimidylpropionate), and bifunctional maleimides such as bis-N-maleimido-1,8-octane. Derivatizing agents such as methyl-3-[(p-azidophenyl)dithio]propioimidate yield photoactivatable intermediates that are capable of forming crosslinks in the presence of light. Alternatively, reactive water-insoluble matrices such as cyanogen bromide-activated carbohydrates and the reactive substrates as described in U.S. Pat. Nos. 3,969,287; 3,691,016; 4,195,128; 4,247,642; 4,229,537; and 4,330,440 are employed for protein immobilization.

[0461] Glutaminyl and asparaginyl residues are frequently deamidated to the corresponding glutamyl and aspartyl residues, respectively. Alternatively, these residues are deamidated under mildly acidic conditions. Either form of these residues falls within the scope of this invention.

[0462] Other modifications include hydroxylation of proline and lysine, phosphorylation of hydroxyl groups of seryl or threonyl residues, methylation of the α-amino groups of lysine, arginine, and histidine side chains (T. E. Creighton, Proteins: Structure and Molecular Properties, W. H. Freeman & Co., San Francisco, 1983, pp. 79-86), acetylation of the N-terminal amine, and amidation of any C-terminal carboxyl group.

[0463] Another type of covalent modification of the antibody constructs included within the scope of this invention comprises altering the glycosylation pattern of the protein. As is known in the art, glycosylation patterns can depend on both the sequence of the protein (e.g., the presence or absence of particular glycosylation amino acid residues, discussed below), or the host cell or organism in which the protein is produced. Particular expression systems are discussed below.

[0464] Glycosylation of polypeptides is typically either N-linked or O-linked. N-linked refers to the attachment of the carbohydrate moiety to the side chain of an asparagine residue. The tri-peptide sequences asparagine-X-serine and asparagine-X-threonine, where X is any amino acid except proline, are the recognition sequences for enzymatic attachment of the carbohydrate moiety to the asparagine side chain. Thus, the presence of either of these tri-peptide sequences in a polypeptide creates a potential glycosylation site. O-linked glycosylation refers to the attachment of one of the sugars N-acetylgalactosamine, galactose, or xylose, to a hydroxyamino acid, most commonly serine or threonine, although 5-hydroxyproline or 5-hydroxylysine may also be used.

[0465] Addition of glycosylation sites to the antibody construct is conveniently accomplished by altering the amino acid sequence such that it contains one or more of the above-described tri-peptide sequences (for N-linked glycosylation sites). The alteration may also be made by the addition of, or substitution by, one or more serine or threonine residues to the starting sequence (for O-linked glycosylation sites). For ease, the amino acid sequence of an antibody construct is preferably altered through changes at the DNA level, particularly by mutating the DNA encoding the polypeptide at preselected bases such that codons are generated that will translate into the desired amino acids.

[0466] Another means of increasing the number of carbohydrate moieties on the antibody construct is by chemical or enzymatic coupling of glycosides to the protein. These procedures are advantageous in that they do not require production of the protein in a host cell that has glycosylation capabilities for N- and O-linked glycosylation. Depending on the coupling mode used, the sugar(s) may be attached to (a) arginine and histidine, (b) free carboxyl groups, (c) free sulfhydryl groups such as those of cysteine, (d) free hydroxyl groups such as those of serine, threonine, or hydroxyproline, (e) aromatic residues such as those of phenylalanine, tyrosine, or tryptophan, or (f) the amide group of glutamine. These methods are described in WO 87/05330, and in Aplin and Wriston, 1981, CRC Crit. Rev. Biochem., pp. 259-306.

[0467] Removal of carbohydrate moieties present on the starting antibody construct may be accomplished chemically or enzymatically. Chemical deglycosylation requires exposure of the protein to the compound trifluoromethanesulfonic acid, or an equivalent compound. This treatment results in the cleavage of most or all sugars except the linking sugar (N-acetylglucosamine or N-acetylgalactosamine), while leaving the polypeptide intact. Chemical deglycosylation is described by Hakimuddin et al., 1987, Arch. Biochem. Biophys. 259:52 and by Edge et al., 1981, Anal. Biochem. 118:131. Enzymatic cleavage of carbohydrate moieties on polypeptides can be achieved by the use of a variety of endo- and exo-glycosidases as described by Thotakura et al., 1987, Meth. Enzymol. 138:350. Glycosylation at potential glycosylation sites may be prevented by the use of the compound tunicamycin as described by Duskin et al., 1982, J. Biol. Chem. 257:3105. Tunicamycin blocks the formation of protein-N-glycoside linkages.

[0468] Other modifications of the antibody construct are also contemplated herein. For example, another type of covalent modification of the antibody construct comprises linking the antibody construct to various non-proteinaceous polymers, including, but not limited to, various polyols such as polyethylene glycol, polypropylene glycol, polyoxyalkylenes, or copolymers of polyethylene glycol and polypropylene glycol, in the manner set forth in U.S. Pat. Nos. 4,640,835; 4,496,689; 4,301,144; 4,670,417; 4,791,192 or 4,179,337. In addition, as is known in the art, amino acid substitutions may be made in various positions within the antibody construct, e.g. in order to facilitate the addition of polymers such as PEG.

[0469] In some embodiments, the covalent modification of the antibody constructs of the invention comprises the addition of one or more labels. The labelling group may be coupled to the antibody construct via spacer arms of various lengths to reduce potential steric hindrance. Various methods for labelling proteins are known in the art and can be used in performing the present invention. The term “label” or “labelling group” refers to any detectable label. In general, labels fall into a variety of classes, depending on the assay in which they are to be detected—the following examples include, but are not limited to:
[0470] a) isotopic labels, which may be radioactive or heavy isotopes, such as radioisotopes or radionuclides (e.g., ³H, ¹⁴C, ¹⁵N, ³⁵S, ⁸⁹Zr, ⁹⁰Y, ⁹⁹Tc, ¹¹¹In, ¹²⁵I, ¹³¹I)
[0471] b) magnetic labels (e.g., magnetic particles)
[0472] c) redox active moieties
[0473] d) optical dyes (including, but not limited to, chromophores, phosphors and fluorophores) such as fluorescent groups (e.g., FITC, rhodamine, lanthanide phosphors), chemiluminescent groups, and fluorophores which can be either “small molecule” fluores or proteinaceous fluores
[0474] e) enzymatic groups (e.g. horseradish peroxidase, β-galactosidase, luciferase, alkaline phosphatase)
[0475] f) biotinylated groups
[0476] g) predetermined polypeptide epitopes recognized by a secondary reporter (e.g., leucine zipper pair sequences, binding sites for secondary antibodies, metal binding domains, epitope tags, etc.)

[0477] By “fluorescent label” is meant any molecule that may be detected via its inherent fluorescent properties. Suitable fluorescent labels include, but are not limited to, fluorescein, rhodamine, tetramethylrhodamine, eosin, erythrosin, coumarin, methyl-coumarins, pyrene, Malacite green, stilbene, Lucifer Yellow, Cascade BlueJ, Texas Red, IAEDANS, EDANS, BODIPY FL, LC Red 640, Cy 5, Cy 5.5, LC Red 705, Oregon green, the Alexa-Fluor dyes (Alexa Fluor 350, Alexa Fluor 430, Alexa Fluor 488, Alexa Fluor 546, Alexa Fluor 568, Alexa Fluor 594, Alexa Fluor 633, Alexa Fluor 660, Alexa Fluor 680), Cascade Blue, Cascade Yellow and R-phycoerythrin (PE) (Molecular Probes, Eugene, Oreg.), FITC, Rhodamine, and Texas Red (Pierce, Rockford, Ill.), Cy5, Cy5.5, Cy7 (Amersham Life Science, Pittsburgh, Pa.). Suitable optical dyes, including fluorophores, are described in Molecular Probes Handbook by Richard P. Haugland.

[0478] Suitable proteinaceous fluorescent labels also include, but are not limited to, green fluorescent protein, including a Renilla, Ptilosarcus, or Aequorea species of GFP (Chalfie et al., 1994, Science 263:802-805), EGFP (Clontech Laboratories, Inc., Genbank Accession Number U55762), blue fluorescent protein (BFP, Quantum Biotechnologies, Inc. 1801 de Maisonneuve Blvd. West, 8th Floor, Montreal, Quebec, Canada H3H 1J9; Stauber, 1998, Biotechniques 24:462-471; Heim et al., 1996, Curr. Biol. 6:178-182), enhanced yellow fluorescent protein (EYFP, Clontech Laboratories, Inc.), luciferase (Ichiki et al., 1993, J. Immunol. 150:5408-5417), β galactosidase (Nolan et al., 1988, Proc. Natl. Acad. Sci. U.S.A. 85:2603-2607) and Renilla (WO92/15673, WO95/07463, WO98/14605, WO98/26277, WO99/49019, U.S. Pat. Nos. 5,292,658; 5,418,155; 5,683,888; 5,741,668; 5,777,079; 5,804,387; 5,874,304; 5,876,995; 5,925,558).

[0479] Leucine zipper domains are peptides that promote oligomerization of the proteins in which they are found. Leucine zippers were originally identified in several DNA-binding proteins (Landschulz et al., 1988, Science 240:1759), and have since been found in a variety of different proteins. Among the known leucine zippers are naturally occurring peptides and derivatives thereof that dimerize or trimerize. Examples of leucine zipper domains suitable for producing soluble oligomeric proteins are described in PCT application WO 94/10308, and the leucine zipper derived from lung surfactant protein D (SPD) described in Hoppe et al., 1994, FEBS Letters 344:191. The use of a modified leucine zipper that allows for stable trimerization of a heterologous protein fused thereto is described in Fanslow et al., 1994, Semin. Immunol. 6:267-78. In one approach, recombinant fusion proteins comprising a CD70 antibody fragment or derivative fused to a leucine zipper peptide are expressed in suitable host cells, and the soluble oligomeric CD70 antibody fragments or derivatives that form are recovered from the culture supernatant.

[0480] The antibody construct of the invention may also comprise additional domains, which are e.g. helpful in the isolation of the molecule or relate to an adapted pharmacokinetic profile of the molecule. Domains helpful for the isolation of an antibody construct may be selected from peptide motives or secondarily introduced moieties, which can be captured in an isolation method, e.g. an isolation column. Non-limiting embodiments of such additional domains comprise peptide motives known as Myc-tag, HAT-tag, HA-tag, TAP-tag, GST-tag, chitin binding domain (CBD-tag), maltose binding protein (MBP-tag), Flag-tag, Strep-tag and variants thereof (e.g. StrepII-tag) and His-tag. All herein disclosed antibody constructs characterized by the identified CDRs are preferred to comprise a His-tag domain, which is generally known as a repeat of consecutive His residues in the amino acid sequence of a molecule, preferably of five, and more preferably of six His residues (hexa-histidine). The His-tag may be located e.g. at the N- or C-terminus of the antibody construct, preferably it is located at the C-terminus. Most preferably, a hexa-histidine tag (HHHHHH, see SEQ ID NO: 779) is linked via peptide bond to the C-terminus of the antibody construct according to the invention.

[0481] The first binding domain of the antibody construct of the present invention binds to human CD70 on the surface of a target cell. The preferred amino acid sequence of human CD70 is represented by SEQ ID NO: 741. It is understood that the term “on the surface”, in the context of the present invention, means that the binding domain specifically binds to an epitope comprised within the CD70 extracellular domain (CD70 ECD). The first binding domain according to the invention hence preferably binds to CD70 when it is expressed by naturally expressing cells or cell lines, and/or by cells or cell lines transformed or (stably/transiently) transfected with CD70. In a preferred embodiment the first binding domain also binds to CD70 when CD70 is used as a “target” or “ligand” molecule in an in vitro binding assay such as BIAcore or Scatchard. The “target cell” can be any prokaryotic or eukaryotic cell expressing CD70 on its surface; preferably the target cell is a cell that is part of the human or animal body, such as a specific cancer cell being selected e.g. from the group consisting of renal, lung, pancreatic, ovarian, breast, colon, or head and neck cancer, melanoma, Kaposi's Sarcoma, embryonal carcinoma, brain tumor, leukemia or lymphoma.

[0482] The term “CD70 ECD” refers to a form of CD70 which is essentially free of transmembrane and cytoplasmic domains of CD70. It will be understood by the skilled artisan that the transmembrane domain identified for the CD70 polypeptide of the present invention is identified pursuant to criteria routinely employed in the art for identifying that type of hydrophobic domain. The exact boundaries of a transmembrane domain may vary but most likely by no more than about 5 amino acids at either end of the domain specifically mentioned herein. A preferred human CD70 ECD is shown in SEQ ID NO: 742.

[0483] The affinity of the first binding domain for human CD70 is preferably ≦20 nM or ≦15 nM, more preferably ≦10 nM, even more preferably ≦5 nM, even more preferably ≦2 nM, even more preferably ≦1 nM, even more preferably ≦0.6 nM, even more preferably ≦0.5 nM, and most preferably ≦0.4 nM. The affinity can be measured for example in a BIAcore assay or in a Scatchard assay, e.g. as described in the Examples. Other methods of determining the affinity are also well-known to the skilled person.

[0484] T cells or T lymphocytes are a type of lymphocyte (itself a type of white blood cell) that play a central role in cell-mediated immunity. There are several subsets of T cells, each with a distinct function. T cells can be distinguished from other lymphocytes, such as B cells and NK cells, by the presence of a T cell receptor (TCR) on the cell surface. The TCR is responsible for recognizing antigens bound to major histocompatibility complex (MHC) molecules and is composed of two different protein chains. In 95% of the T cells, the TCR consists of an alpha (a) and beta (13) chain. When the TCR engages with antigenic peptide and MHC (peptide/MHC complex), the T lymphocyte is activated through a series of biochemical events mediated by associated enzymes, co-receptors, specialized adaptor molecules, and activated or released transcription factors

[0485] The CD3 receptor complex is a protein complex and is composed of four chains. In mammals, the complex contains a CD3γ (gamma) chain, a CD3δ (delta) chain, and two CD3ε (epsilon) chains. These chains associate with the T cell receptor (TCR) and the so-called ζ (zeta) chain to form the T cell receptor CD3 complex and to generate an activation signal in T lymphocytes. The CD3γ (gamma), CD3δ (delta), and CD3ε (epsilon) chains are highly related cell-surface proteins of the immunoglobulin superfamily containing a single extracellular immunoglobulin domain. The intracellular tails of the CD3 molecules contain a single conserved motif known as an immunoreceptor tyrosine-based activation motif or ITAM for short, which is essential for the signaling capacity of the TCR. The CD3 epsilon molecule is a polypeptide which in humans is encoded by the CD3E gene which resides on chromosome 11. The most preferred epitope of CD3 epsilon is comprised within amino acid residues 1-27 of the human CD3 epsilon extracellular domain.

[0486] The redirected lysis of target cells via the recruitment of T cells by a multispecific, at least bispecific, antibody construct involves cytolytic synapse formation and delivery of perforin and granzymes. The engaged T cells are capable of serial target cell lysis, and are not affected by immune escape mechanisms interfering with peptide antigen processing and presentation, or clonal T cell differentiation; see, for example, WO 2007/042261.

[0487] Cytotoxicity mediated by CD70×CD3 bispecific antibody constructs can be measured in various ways. See Examples 8.1 to 8.7. Effector cells can be e.g. stimulated enriched (human) CD8 positive T cells or unstimulated (human) peripheral blood mononuclear cells (PBMC). If the target cells are of macaque origin or express or are transfected with macaque CD70, the effector cells should also be of macaque origin such as a macaque T cell line, e.g. 4119LnPx. The target cells should express (at least the extracellular domain of) CD70, e.g. human or macaque CD70. Target cells can be a cell line (such as CHO) which is stably or transiently transfected with CD70, e.g. human or macaque CD70. Alternatively, the target cells can be a CD70 positive natural expresser cell line, such as the human ovarian carcinoma cell line OVCAR 8. Usually EC50 values are expected to be lower with target cell lines expressing higher levels of CD70 on the cell surface. The effector to target cell (E:T) ratio is usually about 10:1, but can also vary. Cytotoxic activity of CD70×CD3 bispecific antibody constructs can be measured in a 51-chromium release assay (incubation time of about 18 hours) or in a in a FACS-based cytotoxicity assay (incubation time of about 48 hours). Modifications of the assay incubation time (cytotoxic reaction) are also possible. Other methods of measuring cytotoxicity are well-known to the skilled person and comprise MTT or MTS assays, ATP-based assays including bioluminescent assays, the sulforhodamine B (SRB) assay, WST assay, clonogenic assay and the ECIS technology.

[0488] The cytotoxic activity mediated by CD70×CD3 bispecific antibody constructs of the present invention is preferably measured in a cell-based cytotoxicity assay. It may also be measured in a 51-chromium release assay. It is represented by the EC50 value, which corresponds to the half maximal effective concentration (concentration of the antibody construct which induces a cytotoxic response halfway between the baseline and maximum). Preferably, the EC50 value of the CD70×CD3 bispecific antibody constructs is ≦10.000 pM or ≦5000 pM, more preferably ≦4000 pM or ≦3000 pM, even more preferably ≦2000 pM or ≦1000 pM, even more preferably ≦500 pM or ≦400 pM, even more preferably ≦300 pM or ≦200 pM, even more preferably ≦100 pM or ≦50 pM, even more preferably ≦20 pM or ≦0 pM, and most preferably ≦5 pM or ≦2 pM or ≦1 pM, or even ≦0.5 pM or ≦0.2 pM or ≦0.1 pM.

[0489] The above given EC50 values can be measured in different assays. The skilled person is aware that an EC50 value can be expected to be lower when stimulated/enriched CD8+ T cells are used as effector cells, compared with unstimulated PBMC. It can furthermore be expected that the EC50 values are lower when the target cells express a high number of the target antigen compared with a low target expression rat. For example, when stimulated/enriched human CD8+ T cells are used as effector cells (and either CD70 transfected cells such as CHO cells or a CD70 positive cell line are used as target cells), the EC50 value of the CD70×CD3 bispecific antibody construct is preferably ≦1000 pM, more preferably ≦500 pM, even more preferably ≦250 pM, even more preferably ≦100 pM, even more preferably ≦50 pM, even more preferably ≦10 pM, and most preferably ≦5 pM or ≦2 pM or ≦1 pM. When human PBMCs are used as effector cells, the EC50 value of the CD70×CD3 bispecific antibody construct is preferably ≦10.000 pM or ≦5000 pM or ≦4000 pM (in particular when the target cells are a CD70 positive cell line), more preferably ≦2000 pM (in particular when the target cells are CD70 transfected cells such as CHO cells), more preferably ≦1000 pM or ≦500 pM, even more preferably ≦200 pM, even more preferably ≦150 pM, even more preferably 100 pM, and most preferably ≦50 pM or ≦20 pM, or lower. When a macaque T cell line such as LnPx4119 is used as effector cells, and a macaque CD70 transfected cell line such as CHO cells is used as target cell line, the EC50 value of the CD70×CD3 bispecific antibody construct is preferably ≦2000 pM or ≦1500 pM, more preferably ≦1000 pM or ≦500 pM, even more preferably ≦300 pM or ≦250 pM, even more preferably ≦100 pM, and most preferably ≦50 pM or ≦20 pM, or lower, such as ≦10 pM, ≦5 pM, ≦1 pM, or ≦0.5 pM.

[0490] Preferably, the CD70×CD3 bispecific antibody constructs of the present invention do not induce/mediate lysis or do not essentially induce/mediate lysis of CD70 negative cells such as CHO cells. The term “do not induce lysis”, “do not essentially induce lysis”, “do not mediate lysis” or “do not essentially mediate lysis” means that an antibody construct of the present invention does not induce or mediate lysis of more than 30%, preferably not more than 20%, more preferably not more than 10%, particularly preferably not more than 9%, 8%, 7%, 6% or 5% of CD70 negative cells, whereby lysis of a CD70 positive cell line (see above) is set to be 100%. This usually applies for concentrations of the antibody construct of up to 500 nM. The skilled person knows how to measure cell lysis without further ado. Moreover, the present specification teaches specific instructions how to measure cell lysis.

[0491] The difference in cytotoxic activity between the monomeric and the dimeric isoform of individual CD70×CD3 bispecific antibody constructs is referred to as “potency gap”. This potency gap can e.g. be calculated as ratio between EC50 values of the molecule's monomeric and dimeric form, see Example 15. Potency gaps of the CD70×CD3 bispecific antibody constructs of the present invention are preferably ≦5, more preferably ≦4, even more preferably ≦3, even more preferably ≦2 or ≦1.5, and most preferably ≦1.

[0492] The first and/or the second (or any further) binding domain(s) of the antibody construct of the invention is/are preferably cross-species specific for members of the mammalian order of primates. Cross-species specific CD3 binding domains are, for example, described in WO 2008/119567. According to one embodiment, the first and/or second binding domain, in addition to binding to human CD70 and human CD3, respectively, will also bind to CD70/CD3 of primates including (but not limited to) new world primates (such as Callithrix jacchus, Saguinus Oedipus or Saimiri sciureus), old world primates (such as baboons and macaques), gibbons, orangutans, and non-human homininae. It is envisaged that the first binding domain of the antibody construct of the invention which binds to human CD70 on the surface of a target cell also binds at least to macaque CD70, and/or the second binding domain which binds to human CD3 on the surface of a T cell also binds at least to macaque CD3. A preferred macaque is Macaca fascicularis. Macaca mulatta (Rhesus) is also envisaged.

[0493] A preferred bispecific antibody construct of the invention comprises a first binding domain which binds to human CD70 on the surface of a target cell and a second binding domain which binds to human CD3 on the surface of a T cell and at least macaque CD3.

[0494] In one aspect of the invention, the first binding domain binds to human CD70 and further binds to macaque CD70, such as CD70 of Macaca fascicularis, and more preferably, to macaque CD70 ECD. A preferred Macaca fascicularis CD70 is depicted in SEQ ID NO: 755. A preferred macaque CD70 ECD is depicted in SEQ ID NO: 756. The affinity of the first binding domain for macaque CD70 is preferably ≦50 or ≦40 nM, more preferably ≦30 nM or ≦20 nM or ≦15 nM, more preferably ≦10 nM or ≦5 nM, even more preferably ≦2 nM or ≦1 nM, even more preferably ≦0.5 nM or ≦0.2 nM, and most preferably ≦0.1 nM.

[0495] Preferably the affinity gap of the antibody constructs according to the invention for binding macaque CD70 versus human CD70 [ma CD70:hu CD70] (as determined e.g. by BiaCore or by Scatchard analysis) is between 0.1 and 10, more preferably between 0.2 and 5 or between 0.2 and 2, even more preferably between 0.3 and 4, even more preferably between 0.5 and 3 or between 0.5 and 2.5, and most preferably between 0.5 and 2 or between 0.6 and 2. See Examples 3 and 4.

[0496] In one embodiment of the antibody construct of the invention, the second binding domain binds to human CD3 epsilon and to Callithrix jacchus, Saguinus Oedipus or Saimiri sciureus CD3 epsilon. Preferably, the second binding domain binds to an extracellular epitope of these CD3 epsilon chains. It is also envisaged that the second binding domain binds to an extracellular epitope of the human and the Macaca CD3 epsilon chain. The most preferred epitope of CD3 epsilon is comprised within amino acid residues 1-27 of the human CD3 epsilon extracellular domain. Even more specifically, the epitope comprises at least the amino acid sequence Gln-Asp-Gly-Asn-Glu. Callithrix jacchus and Saguinus oedipus are both new world primate belonging to the family of Callitrichidae, while Saimiri sciureus is a new world primate belonging to the family of Cebidae.

[0497] It is particularly preferred for the antibody construct of the present invention that the second binding domain which binds to human CD3 on the surface of a T cell comprises a VL region comprising CDR-L1, CDR-L2 and CDR-L3 selected from:
[0498] (a) CDR-L1 as depicted in SEQ ID NO: 27 of WO 2008/119567, CDR-L2 as depicted in SEQ ID NO: 28 of WO 2008/119567 and CDR-L3 as depicted in SEQ ID NO: 29 of WO 2008/119567;
[0499] (b) CDR-L1 as depicted in SEQ ID NO: 117 of WO 2008/119567, CDR-L2 as depicted in SEQ ID NO: 118 of WO 2008/119567 and CDR-L3 as depicted in SEQ ID NO: 119 of WO 2008/119567; and
[0500] (c) CDR-L1 as depicted in SEQ ID NO: 153 of WO2008/119567, CDR-L2 as depicted in SEQ ID NO: 154 of WO 2008/119567 and CDR-L3 as depicted in SEQ ID NO: 155 of WO 2008/119567.

[0501] In an alternatively preferred embodiment of the antibody construct of the present invention, the second binding domain which binds to human CD3 on the surface of a T cell comprises a VH region comprising CDR-H 1, CDR-H2 and CDR-H3 selected from:
[0502] (a) CDR-H1 as depicted in SEQ ID NO: 12 of WO2008/119567, CDR-H2 as depicted in SEQ ID NO: 13 of WO 2008/119567 and CDR-H3 as depicted in SEQ ID NO: 14 of WO 2008/119567;
[0503] (b) CDR-H1 as depicted in SEQ ID NO: 30 of WO 2008/119567, CDR-H2 as depicted in SEQ ID NO: 31 of WO 2008/119567 and CDR-H3 as depicted in SEQ ID NO: 32 of WO 2008/119567;
[0504] (c) CDR-H1 as depicted in SEQ ID NO: 48 of WO 2008/119567, CDR-H2 as depicted in SEQ ID NO: 49 of WO 2008/119567 and CDR-H3 as depicted in SEQ ID NO: 50 of WO 2008/119567;
[0505] (d) CDR-H1 as depicted in SEQ ID NO: 66 of WO 2008/119567, CDR-H2 as depicted in SEQ ID NO: 67 of WO 2008/119567 and CDR-H3 as depicted in SEQ ID NO: 68 of WO 2008/119567;
[0506] (e) CDR-H1 as depicted in SEQ ID NO: 84 of WO 2008/119567, CDR-H2 as depicted in SEQ ID NO: 85 of WO 2008/119567 and CDR-H3 as depicted in SEQ ID NO: 86 of WO 2008/119567;
[0507] (f) CDR-H1 as depicted in SEQ ID NO: 102 of WO2008/119567, CDR-H2 as depicted in SEQ ID NO: 103 of WO 2008/119567 and CDR-H3 as depicted in SEQ ID NO: 104 of WO 2008/119567;
[0508] (g) CDR-H1 as depicted in SEQ ID NO: 120 of WO2008/119567, CDR-H2 as depicted in SEQ ID NO: 121 of WO 2008/119567 and CDR-H3 as depicted in SEQ ID NO: 122 of WO 2008/119567;
[0509] (h) CDR-H1 as depicted in SEQ ID NO: 138 of WO2008/119567, CDR-H2 as depicted in SEQ ID NO: 139 of WO 2008/119567 and CDR-H3 as depicted in SEQ ID NO: 140 of WO 2008/119567;
[0510] (i) CDR-H1 as depicted in SEQ ID NO: 156 of WO2008/119567, CDR-H2 as depicted in SEQ ID NO: 157 of WO 2008/119567 and CDR-H3 as depicted in SEQ ID NO: 158 of WO 2008/119567; and
[0511] (j) CDR-H1 as depicted in SEQ ID NO: 174 of WO2008/119567, CDR-H2 as depicted in SEQ ID NO: 175 of WO 2008/119567 and CDR-H3 as depicted in SEQ ID NO: 176 of WO 2008/119567.

[0512] It is further preferred for the antibody construct of the present invention that the second binding domain which binds to human CD3 on the surface of a T cell comprises a VL region selected from the group consisting of a VL region as depicted in SEQ ID NO: 35, 39, 125, 129, 161 or 165 of WO 2008/119567.

[0513] It is alternatively preferred that the second binding domain which binds to human CD3 on the surface of a T cell comprises a VH region selected from the group consisting of a VH region as depicted in SEQ ID NO: 15, 19, 33, 37, 51, 55, 69, 73, 87, 91, 105, 109, 123, 127, 141, 145, 159, 163, 177 or 181 of WO 2008/119567.

[0514] More preferably, the antibody construct of the present invention is characterized by the second binding domain which binds to human CD3 on the surface of a T cell comprising a VL region and a VH region selected from the group consisting of:
[0515] (a) a VL region as depicted in SEQ ID NO: 17 or 21 of WO 2008/119567 and a VH region as depicted in SEQ ID NO: 15 or 19 of WO 2008/119567;
[0516] (b) a VL region as depicted in SEQ ID NO: 35 or 39 of WO 2008/119567 and a VH region as depicted in SEQ ID NO: 33 or 37 of WO 2008/119567;
[0517] (c) a VL region as depicted in SEQ ID NO: 53 or 57 of WO 2008/119567 and a VH region as depicted in SEQ ID NO: 51 or 55 of WO 2008/119567;
[0518] (d) a VL region as depicted in SEQ ID NO: 71 or 75 of WO 2008/119567 and a VH region as depicted in SEQ ID NO: 69 or 73 of WO 2008/119567;
[0519] (e) a VL region as depicted in SEQ ID NO: 89 or 93 of WO 2008/119567 and a VH region as depicted in SEQ ID NO: 87 or 91 of WO 2008/119567;
[0520] (f) a VL region as depicted in SEQ ID NO: 107 or 111 of WO 2008/119567 and a VH region as depicted in SEQ ID NO: 105 or 109 of WO 2008/119567;
[0521] (g) a VL region as depicted in SEQ ID NO: 125 or 129 of WO 2008/119567 and a VH region as depicted in SEQ ID NO: 123 or 127 of WO 2008/119567;
[0522] (h) a VL region as depicted in SEQ ID NO: 143 or 147 of WO 2008/119567 and a VH region as depicted in SEQ ID NO: 141 or 145 of WO 2008/119567;
[0523] (i) a VL region as depicted in SEQ ID NO: 161 or 165 of WO 2008/119567 and a VH region as depicted in SEQ ID NO: 159 or 163 of WO 2008/119567; and
[0524] (j) a VL region as depicted in SEQ ID NO: 179 or 183 of WO 2008/119567 and a VH region as depicted in SEQ ID NO: 177 or 181 of WO 2008/119567.

[0525] According to a preferred embodiment of the antibody construct of the present invention, the binding domains and in particular the second binding domain (which binds to human CD3 on the surface of a T cell) have the following format: The pairs of VH regions and VL regions are in the format of a single chain antibody (scFv). The VH and VL regions are arranged in the order VH-VL or VL-VH. It is preferred that the VH-region is positioned N-terminally of a linker sequence, and the VL-region is positioned C-terminally of the linker sequence.

[0526] A preferred embodiment of the above described antibody construct of the present invention is characterized by the second binding domain which binds to human CD3 on the surface of a T cell comprising an amino acid sequence selected from the group consisting of SEQ ID NOs: 23, 25, 41, 43, 59, 61, 77, 79, 95, 97, 113, 115, 131, 133, 149, 151, 167, 169, 185 or 187 of WO 2008/119567.

[0527] Hence, in one embodiment, the antibody construct of the invention comprises a polypeptide selected from the group consisting of those depicted in SEQ ID NO: 10, SEQ ID NO: 20, SEQ ID NO: 30, SEQ ID NO: 40, SEQ ID NO: 50, SEQ ID NO: 60, SEQ ID NO: 70, SEQ ID NO: 80, SEQ ID NO: 90, SEQ ID NO: 100, SEQ ID NO: 110, SEQ ID NO: 120, SEQ ID NO: 130, SEQ ID NO: 140, SEQ ID NO: 150, SEQ ID NO: 160, SEQ ID NO: 170, SEQ ID NO: 180, SEQ ID NO: 190, SEQ ID NO: 200, SEQ ID NO: 210, SEQ ID NO: 220, SEQ ID NO: 230, SEQ ID NO: 240, SEQ ID NO: 250, SEQ ID NO: 260, SEQ ID NO: 270, SEQ ID NO: 280, SEQ ID NO: 290, SEQ ID NO: 300, SEQ ID NO: 310, SEQ ID NO: 320, SEQ ID NO: 330, SEQ ID NO: 340, SEQ ID NO: 350, SEQ ID NO: 360, SEQ ID NO: 370, SEQ ID NO: 380, SEQ ID NO: 390, SEQ ID NO: 400, SEQ ID NO: 410, SEQ ID NO: 420, SEQ ID NO: 430, SEQ ID NO: 440, SEQ ID NO: 450, SEQ ID NO: 460, SEQ ID NO: 470, SEQ ID NO: 480, SEQ ID NO: 490, SEQ ID NO: 500, SEQ ID NO: 510, SEQ ID NO: 520, SEQ ID NO: 530, SEQ ID NO: 540, SEQ ID NO: 550, SEQ ID NO: 560, SEQ ID NO: 570, SEQ ID NO: 580, SEQ ID NO: 590, SEQ ID NO: 600, SEQ ID NO: 610, SEQ ID NO: 620, SEQ ID NO: 630, SEQ ID NO: 640, SEQ ID NO: 650, SEQ ID NO: 660, SEQ ID NO: 670, SEQ ID NO: 680, SEQ ID NO: 690, SEQ ID NO: 700, SEQ ID NO: 710, SEQ ID NO: 720, SEQ ID NO: 730, SEQ ID NO: 740, SEQ ID NO: 923, SEQ ID NO: 927, SEQ ID NO: 931, SEQ ID NO: 935, SEQ ID NO: 939, SEQ ID NO: 943, SEQ ID NO: 947, SEQ ID NO: 951, SEQ ID NO: 955, SEQ ID NO: 959, SEQ ID NO: 963, SEQ ID NO: 967, SEQ ID NO: 971, SEQ ID NO: 975, SEQ ID NO: 979, SEQ ID NO: 983, SEQ ID NO: 987, SEQ ID NO: 991, SEQ ID NO: 995, SEQ ID NO: 999, SEQ ID NO: 1003, SEQ ID NO: 1007, SEQ ID NO: 1011, SEQ ID NO: 1015, SEQ ID NO: 1019, SEQ ID NO: 1023, SEQ ID NO: 1027, SEQ ID NO: 1031, SEQ ID NO: 1035, SEQ ID NO: 1039, SEQ ID NO: 1043, SEQ ID NO: 1053, SEQ ID NO: 1057, SEQ ID NO: 1067, SEQ ID NO: 1071, SEQ ID NO: 1081, SEQ ID NO: 1085, SEQ ID NO: 1095, SEQ ID NO: 1099, SEQ ID NO: 1109, SEQ ID NO: 1113, SEQ ID NO: 1123, SEQ ID NO: 1127, SEQ ID NO: 1137, SEQ ID NO: 1141, SEQ ID NO: 1151, SEQ ID NO: 1155, SEQ ID NO: 1165, SEQ ID NO: 1169, SEQ ID NO: 1179, SEQ ID NO: 1183, SEQ ID NO: 1193, SEQ ID NO: 1197, SEQ ID NO: 1207, SEQ ID NO: 1211, SEQ ID NO: 1221, SEQ ID NO: 1225, SEQ ID NO: 1235, SEQ ID NO: 1239, SEQ ID NO: 1249, SEQ ID NO: 1253, SEQ ID NO: 1263, SEQ ID NO: 1267, SEQ ID NO: 1277, SEQ ID NO: 1281, SEQ ID NO: 1291, SEQ ID NO: 1295, SEQ ID NO: 1305, SEQ ID NO: 1309, SEQ ID NO: 1319, SEQ ID NO: 1323, SEQ ID NO: 1333, SEQ ID NO: 1337, SEQ ID NO: 1347, SEQ ID NO: 1351, SEQ ID NO: 1361, SEQ ID NO: 1365, SEQ ID NO: 1375, SEQ ID NO: 1379, SEQ ID NO: 1389, SEQ ID NO: 1393, SEQ ID NO: 1403, SEQ ID NO: 1407, SEQ ID NO: 1417, SEQ ID NO: 1421, SEQ ID NO: 1431, SEQ ID NO: 1435, SEQ ID NO: 1445, SEQ ID NO: 1449, SEQ ID NO: 1459, SEQ ID NO: 1463, SEQ ID NO: 1473, SEQ ID NO: 1477, SEQ ID NO: 1487, SEQ ID NO: 1491, SEQ ID NO: 1501, SEQ ID NO: 1505, SEQ ID NO: 1515, SEQ ID NO: 1519, SEQ ID NO: 1529, SEQ ID NO: 1533, SEQ ID NO: 1543, SEQ ID NO: 1547, SEQ ID NO: 1557, SEQ ID NO: 1561, SEQ ID NO: 1571, and SEQ ID NO: 1575.

[0528] Preferred is when the antibody construct of the invention comprises a polypeptide selected from the group consisting of those depicted in SEQ ID NO: 1053, SEQ ID NO: 1095, SEQ ID NO: 1151, SEQ ID NO: 1179, SEQ ID NO: 1193, SEQ ID NO: 1221, SEQ ID NO: 1235, SEQ ID NO: 1249, SEQ ID NO: 1263, SEQ ID NO: 1277, SEQ ID NO: 1347, SEQ ID NO: 1361, SEQ ID NO: 1375, SEQ ID NO: 1431, and SEQ ID NO: 1445.

[0529] Amino acid sequence modifications of the antibody constructs described herein are also contemplated. For example, it may be desirable to improve the binding affinity and/or other biological properties of the antibody construct. Amino acid sequence variants of the antibody constructs are prepared by introducing appropriate nucleotide changes into the antibody constructs nucleic acid, or by peptide synthesis. All of the below described amino acid sequence modifications should result in an antibody construct which still retains the desired biological activity (binding to CD70 and to CD3) of the unmodified parental molecule.

[0530] The term “amino acid” or “amino acid residue” typically refers to an amino acid having its art recognized definition such as an amino acid selected from the group consisting of: alanine (Ala or A); arginine (Arg or R); asparagine (Asn or N); aspartic acid (Asp or D); cysteine (Cys or C); glutamine (Gln or Q); glutamic acid (Glu or E); glycine (Gly or G); histidine (His or H); isoleucine (He or I): leucine (Leu or L); lysine (Lys or K); methionine (Met or M); phenylalanine (Phe or F); pro line (Pro or P); serine (Ser or S); threonine (Thr or T); tryptophan (Trp or W); tyrosine (Tyr or Y); and valine (Val or V), although modified, synthetic, or rare amino acids may be used as desired. Generally, amino acids can be grouped as having a nonpolar side chain (e.g., Ala, Cys, He, Leu, Met, Phe, Pro, Val); a negatively charged side chain (e.g., Asp, Glu); a positively charged sidechain (e.g., Arg, His, Lys); or an uncharged polar side chain (e.g., Asn, Cys, Gin, Gly, His, Met, Phe, Ser, Thr, Trp, and Tyr).

[0531] Amino acid modifications include, for example, deletions from, and/or insertions into, and/or substitutions of, residues within the amino acid sequences of the antibody constructs. Any combination of deletion, insertion, and substitution is made to arrive at the final construct, provided that the final construct possesses the desired characteristics. The amino acid changes also may alter post-translational processes of the antibody constructs, such as changing the number or position of glycosylation sites.

[0532] For example, 1, 2, 3, 4, 5, or 6 amino acids may be inserted or deleted in each of the CDRs (of course, dependent on their length), while 1, 2, 3, 4, 5, 6, 7, 8, 9, 10, 11, 12, 13, 14, 15, 16, 17, 18, 19, 20, or 25 amino acids may be inserted or deleted in each of the FRs. Preferably, amino acid sequence insertions include amino- and/or carboxyl-terminal fusions ranging in length from 1, 2, 3, 4, 5, 6, 7, 8, 9 or 10 residues to polypeptides containing a hundred or more residues, as well as intra-sequence insertions of single or multiple amino acid residues. An insertional variant of the antibody construct of the invention includes the fusion to the N-terminus or to the C-terminus of the antibody construct of an enzyme or the fusion to a polypeptide which increases the serum half-life of the antibody construct.

[0533] The sites of greatest interest for substitutional mutagenesis include the CDRs of the heavy and/or light chain, in particular the hypervariable regions, but FR alterations in the heavy and/or light chain are also contemplated. The substitutions are preferably conservative substitutions as described herein. Preferably, 1, 2, 3, 4, 5, 6, 7, 8, 9, or 10 amino acids may be substituted in a CDR, while 1, 2, 3, 4, 5, 6, 7, 8, 9, 10, 11, 12, 13, 14, 15, 16, 17, 18, 19, 20, or 25 amino acids may be substituted in the framework regions (FRs), depending on the length of the CDR or FR. For example, if a CDR sequence encompasses 6 amino acids, it is envisaged that one, two or three of these amino acids are substituted. Similarly, if a CDR sequence encompasses 15 amino acids it is envisaged that one, two, three, four, five or six of these amino acids are substituted.

[0534] A useful method for identification of certain residues or regions of the antibody constructs that are preferred locations for mutagenesis is called “alanine scanning mutagenesis” as described by Cunningham and Wells in Science, 244: 1081-1085 (1989). Here, a residue or group of target residues within the antibody construct is/are identified (e.g. charged residues such as arg, asp, his, lys, and glu) and replaced by a neutral or negatively charged amino acid (most preferably alanine or polyalanine) to affect the interaction of the amino acids with the epitope.

[0535] Those amino acid locations demonstrating functional sensitivity to the substitutions are then refined by introducing further or other variants at, or for, the sites of substitution. Thus, while the site or region for introducing an amino acid sequence variation is predetermined, the nature of the mutation per se needs not to be predetermined. For example, to analyze or optimize the performance of a mutation at a given site, alanine scanning or random mutagenesis may be conducted at a target codon or region, and the expressed antibody construct variants are screened for the optimal combination of desired activity. Techniques for making substitution mutations at predetermined sites in the DNA having a known sequence are well known, for example, M13 primer mutagenesis and PCR mutagenesis. Screening of the mutants is done using assays of antigen binding activities, such as CD70 or CD3 binding.

[0536] Generally, if amino acids are substituted in one or more or all of the CDRs of the heavy and/or light chain, it is preferred that the then-obtained “substituted” sequence is at least 60% or 65%, more preferably 70% or 75%, even more preferably 80% or 85%, and particularly preferably 90% or 95% identical to the “original” CDR sequence. This means that it is dependent of the length of the CDR to which degree it is identical to the “substituted” sequence. For example, a CDR having 5 amino acids is preferably 80% identical to its substituted sequence in order to have at least one amino acid substituted. Accordingly, the CDRs of the antibody construct may have different degrees of identity to their substituted sequences, e.g., CDRL1 may have 80%, while CDRL3 may have 90%.

[0537] Preferred substitutions (or replacements) are conservative substitutions. However, any substitution (including non-conservative substitution or one or more from the “exemplary substitutions” listed in Table 3, below) is envisaged as long as the antibody construct retains its capability to bind to CD70 via the first binding domain and to CD3 or CD3 epsilon via the second binding domain and/or its CDRs have an identity to the then substituted sequence (at least 60% or 65%, more preferably 70% or 75%, even more preferably 80% or 85%, and particularly preferably 90% or 95% identical to the “original” CDR sequence).

[0538] Conservative substitutions are shown in Table 3 under the heading of “preferred substitutions”. If such substitutions result in a change in biological activity, then more substantial changes, denominated “exemplary substitutions” in Table 3, or as further described below in reference to amino acid classes, may be introduced and the products screened for a desired characteristic.

TABLE 3
Amino acid substitutions

| | | Preferred |
|---|---|---|
| Original | Exemplary Substitutions | Substitutions |
| Ala (A) | val, leu, ile | val |
| Arg (R) | lys, gln, asn | lys |
| Asn (N) | gln, his, asp, lys, arg | gln |
| Asp (D) | glu, asn | glu |
| Cys (C) | ser, ala | ser |
| Gln (Q) | asn, glu | asn |
| Glu (E) | asp, gln | asp |
| Gly (G) | Ala | ala |
| His (H) | asn, gln, lys, arg | arg |
| Ile (I) | leu, val, met, ala, phe | leu |
| Leu (L) | norleucine, ile, val, met, ala | ile |
| Lys (K) | arg, gln, asn | arg |
| Met (M) | leu, phe, ile | leu |
| Phe (F) | leu, val, ile, ala, tyr | tyr |
| Pro (P) | Ala | ala |
| Ser (S) | Thr | thr |
| Thr (T) | Ser | ser |
| Trp (W) | tyr, phe | tyr |
| Tyr (Y) | trp, phe, thr, ser | phe |
| Val (V) | ile, leu, met, phe, ala | leu |

[0539] Substantial modifications in the biological properties of the antibody construct of the present invention are accomplished by selecting substitutions that differ significantly in their effect on maintaining (a) the structure of the polypeptide backbone in the area of the substitution, for example, as a sheet or helical conformation, (b) the charge or hydrophobicity of the molecule at the target site, or (c) the bulk of the side chain. Naturally occurring residues are divided into groups based on common side-chain properties: (1) hydrophobic: norleucine, met, ala, val, leu, ile; (2) neutral hydrophilic: cys, ser, thr; (3) acidic: asp, glu; (4) basic: asn, gin, his, lys, arg; (5) residues that influence chain orientation: gly, pro; and (6) aromatic:trp, tyr, phe.

[0540] Non-conservative substitutions will entail exchanging a member of one of these classes for another class. Any cysteine residue not involved in maintaining the proper conformation of the antibody construct may be substituted, generally with serine, to improve the oxidative stability of the molecule and prevent aberrant crosslinking. Conversely, cysteine bond(s) may be added to the antibody to improve its stability (particularly where the antibody is an antibody fragment such as an Fv fragment).

[0541] For amino acid sequences, sequence identity and/or similarity is determined by using standard techniques known in the art, including, but not limited to, the local sequence identity algorithm of Smith and Waterman, 1981, Adv. Appl. Math. 2:482, the sequence identity alignment algorithm of Needleman and Wunsch, 1970, J. Mol. Biol. 48:443, the search for similarity method of Pearson and Lipman, 1988, Proc. Nat. Acad. Sci. U.S.A. 85:2444, computerized implementations of these algorithms (GAP, BESTFIT, FASTA, and TFASTA in the Wisconsin Genetics Software Package, Genetics Computer Group, 575 Science Drive, Madison, Wis.), the Best Fit sequence program described by Devereux et al., 1984, Nucl. Acid Res. 12:387-395, preferably using the default settings, or by inspection. Preferably, percent identity is calculated by FastDB based upon the following parameters: mismatch penalty of 1; gap penalty of 1; gap size penalty of 0.33; and joining penalty of 30, “Current Methods in Sequence Comparison and Analysis,” Macromolecule Sequencing and Synthesis, Selected Methods and Applications, pp 127-149 (1988), Alan R. Liss, Inc.

[0542] An example of a useful algorithm is PILEUP. PILEUP creates a multiple sequence alignment from a group of related sequences using progressive, pairwise alignments. It can also plot a tree showing the clustering relationships used to create the alignment. PILEUP uses a simplification of the progressive alignment method of Feng & Doolittle, 1987, J. Mol. Evol. 35:351-360; the method is similar to that described by Higgins and Sharp, 1989, CABIOS 5:151-153. Useful PILEUP parameters including a default gap weight of 3.00, a default gap length weight of 0.10, and weighted end gaps.

[0543] Another example of a useful algorithm is the BLAST algorithm, described in: Altschul et al., 1990, J. Mol. Biol. 215:403-410; Altschul et al., 1997, Nucleic Acids Res. 25:3389-3402; and Karin et al., 1993, Proc. Natl. Acad. Sci. U.S.A. 90:5873-5787. A particularly useful BLAST program is the WU-BLAST-2 program which was obtained from Altschul et al., 1996, Methods in Enzymology 266:460-480. WU-BLAST-2 uses several search parameters, most of which are set to the default values. The adjustable parameters are set with the following values: overlap span=1, overlap fraction=0.125, word threshold (T)=II. The HSP S and HSP S2 parameters are dynamic values and are established by the program itself depending upon the composition of the particular sequence and composition of the particular database against which the sequence of interest is being searched; however, the values may be adjusted to increase sensitivity.

[0544] An additional useful algorithm is gapped BLAST as reported by Altschul et al., 1993, Nucl. Acids Res. 25:3389-3402. Gapped BLAST uses BLOSUM-62 substitution scores; threshold T parameter set to 9; the two-hit method to trigger ungapped extensions, charges gap lengths of k a cost of 10+k; Xu set to 16, and Xg set to 40 for database search stage and to 67 for the output stage of the algorithms. Gapped alignments are triggered by a score corresponding to about 22 bits.

[0545] Generally, the amino acid homology, similarity, or identity between individual variant CDRs are at least 60% to the sequences depicted herein, and more typically with preferably increasing homologies or identities of at least 65% or 70%, more preferably at least 75% or 80%, even more preferably at least 85%, 90%, 91%, 92%, 93%, 94%, 95%, 96%, 97%, 98%, 99%, and almost 100%. In a similar manner, “percent (%) nucleic acid sequence identity” with respect to the nucleic acid sequence of the binding proteins identified herein is defined as the percentage of nucleotide residues in a candidate sequence that are identical with the nucleotide residues in the coding sequence of the antibody construct. A specific method utilizes the BLASTN module of WU-BLAST-2 set to the default parameters, with overlap span and overlap fraction set to 1 and 0.125, respectively.

[0546] Generally, the nucleic acid sequence homology, similarity, or identity between the nucleotide sequences encoding individual variant CDRs and the nucleotide sequences depicted herein are at least 60%, and more typically with preferably increasing homologies or identities of at least 65%, 70%, 75%, 80%, 81%, 82%, 83%, 84%, 85%, 86%, 87%, 88%, 89%, 90%, 91%, 92%, 93%, 94%, 95%, 96%, 97%, 98%, or 99%, and almost 100%. Thus, a “variant CDR” is one with the specified homology, similarity, or identity to the parent CDR of the invention, and shares biological function, including, but not limited to, at least 60%, 65%, 70%, 75%, 80%, 81%, 82%, 83%, 84%, 85%, 86%, 87%, 88%, 89%, 90%, 91%, 92%, 93%, 94%, 95%, 96%, 97%, 98%, or 99% of the specificity and/or activity of the parent CDR.

[0547] In one embodiment, the percentage of identity to human germline of the antibody constructs according to the invention is ≧70% or ≧75%, more preferably ≧80% or ≧85%, even more preferably ≧90%, and most preferably ≧91%, ≧92%, ≧93%, 94%, ≧95% or even ≧96%, ≧97% or ≧98%. See Example 7. Identity to human antibody germline gene products is thought to be an important feature to reduce the risk of therapeutic proteins to elicit an immune response against the drug in the patient during treatment. Hwang & Foote (“Immunogenicity of engineered antibodies”; Methods 36 (2005) 3-10) demonstrate that the reduction of non-human portions of drug antibody constructs leads to a decrease of risk to induce anti-drug antibodies in the patients during treatment. By comparing an exhaustive number of clinically evaluated antibody drugs and the respective immunogenicity data, the trend is shown that humanization of the V-regions of antibodies makes the protein less immunogenic (average 5.1% of patients) than antibodies carrying unaltered non-human V regions (average 23.59% of patients). A higher degree of identity to human sequences is hence desirable for V-region based protein therapeutics in the form of antibody constructs. For this purpose of determining the germline identity, the V-regions of VL can be aligned with the amino acid sequences of human germline V segments and J segments (http://vbase.mrc-cpe.cam.ac.uk/) using Vector NTI software and the amino acid sequence calculated by dividing the identical amino acid residues by the total number of amino acid residues of the VL in percent. The same can be done for the VH segments (http://vbase.mrc-cpe.cam.ac.uk/) with the exception that the VH CDR3 may be excluded due to its high diversity and a lack of existing human germline VH CDR3 alignment partners. Recombinant techniques can then be used to increase sequence identity to human antibody germline genes.

[0548] In a further embodiment, the bispecific antibody constructs of the present invention exhibit high monomer yields under standard research scale conditions, e.g., in a standard two-step purification process. Preferably the monomer yield of the antibody constructs according to the invention is ≧0.25 mg/L supernatant, more preferably ≧0.5 mg/L, even more preferably ≧1 mg/L, and most preferably ≧2.5 mg/L supernatant.

[0549] Likewise, the yield of the dimeric antibody construct isoforms and hence the monomer percentage (i.e., monomer: (monomer+dimer)) of the antibody constructs can be determined. The productivity of monomeric and dimeric antibody constructs and the calculated monomer percentage can e.g. be obtained in the SEC purification step of culture supernatant from standardized research-scale production in roller bottles. In one embodiment, the monomer percentage of the antibody constructs is ≧80%, more preferably ≧85%, even more preferably ≧90%, and most preferably ≧95%.

[0550] In one embodiment, the antibody constructs have a preferred plasma stability (ratio of EC50 with plasma to EC50 w/o plasma) of ≦8 or ≦7 or ≦6, more preferably ≦5 or ≦4, more preferably ≦3.5 or ≦3, even more preferably ≦2.5 or ≦2, and most preferably ≦1.5 or ≦1. The plasma stability of an antibody construct can be tested by incubation of the construct in human plasma at 37° C. for 24 hours followed by EC50 determination in a 51-chromium release cytotoxicity assay. The effector cells in the cytotoxicity assay can be stimulated enriched human CD8 positive T cells. Target cells can e.g. be CHO cells transfected with human CD70. The effector to target cell (E:T) ratio can be chosen as 10:1. The human plasma pool used for this purpose is derived from the blood of healthy donors collected by EDTA coated syringes. Cellular components are removed by centrifugation and the upper plasma phase is collected and subsequently pooled. As control, antibody constructs are diluted immediately prior to the cytotoxicity assay in RPMI-1640 medium. The plasma stability is calculated as ratio of EC50 (after plasma incubation) to EC50 (control). See Example 11.

[0551] It is furthermore preferred that the monomer to dimer conversion of antibody constructs of the invention is low. The conversion can be measured under different conditions and analyzed by high performance size exclusion chromatography. See Example 9. For example, incubation of the monomeric isoforms of the antibody constructs can be carried out for 7 days at 37° C. and concentrations of e.g. 100 μg/ml or 250 μg/ml in an incubator. Under these conditions, it is preferred that the antibody constructs of the invention show a dimer percentage that is ≦5%, more preferably ≦4%, even more preferably ≦3%, even more preferably ≦2.5%, even more preferably ≦2%, even more preferably ≦1.5%, and most preferably ≦1%, ≦0.6%, or ≦0.5%, ≦0.3% or even 0%.

[0552] It is also preferred that the bispecific antibody constructs of the present invention present with very low dimer conversion after a number of freeze/thaw cycles. For example, the antibody construct monomer is adjusted to a concentration of 250 μg/ml e.g. in generic formulation buffer and subjected to three freeze/thaw cycles (freezing at −80° C. for 30 min followed by thawing for 30 min at room temperature), followed by high performance SEC to determine the percentage of initially monomeric antibody construct, which had been converted into dimeric antibody construct. Preferably the dimer percentages of the bispecific antibody constructs are ≦5%, more preferably ≦4%, even more preferably ≦3%, even more preferably ≦2.5%, even more preferably ≦2%, even more preferably ≦1.5%, and most preferably ≦1% or even ≦0.5% or 0%, for example after three freeze/thaw cycles.

[0553] The bispecific antibody constructs of the present invention preferably show a favorable thermostability with aggregation temperatures ≧45° C. or ≧50° C., more preferably ≧52° C. or ≧54° C., even more preferably ≧56° C. or ≧57° C., and most preferably ≧58° C. or ≧59° C. or ≧60° C. The thermostability parameter can be determined in terms of antibody aggregation temperature as follows: Antibody solution at a concentration 250 μg/ml is transferred into a single use cuvette and placed in a Dynamic Light Scattering (DLS) device. The sample is heated from 40° C. to 70° C. at a heating rate of 0.5° C./min with constant acquisition of the measured radius. Increase of radius indicating melting of the protein and aggregation is used to calculate the aggregation temperature of the antibody. See Example 10.

[0554] Alternatively, temperature melting curves can be determined by Differential Scanning Calorimetry (DSC) to determine intrinsic biophysical protein stabilities of the antibody constructs. These experiments are performed using a MicroCal LLC (Northampton, Mass., U.S.A) VP-DSC device. The energy uptake of a sample containing an antibody construct is recorded from 20° C. to 90° C. compared to a sample containing only the formulation buffer. The antibody constructs are adjusted to a final concentration of 250 μg/ml e.g. in SEC running buffer. For recording of the respective melting curve, the overall sample temperature is increased stepwise. At each temperature T energy uptake of the sample and the formulation buffer reference is recorded. The difference in energy uptake Cp (kcal/mole/° C.) of the sample minus the reference is plotted against the respective temperature. The melting temperature is defined as the temperature at the first maximum of energy uptake.

[0555] It is furthermore envisaged that the CD70×CD3 bispecific antibody constructs of the invention do not cross-react with (i.e., do not essentially bind to) the human CD70 paralogue CD40L. Furthermore, it is envisaged that the CD70×CD3 bispecific antibody constructs of the invention do not cross-react with (i.e., do not essentially bind to) the macaque/cyno CD70 paralogue CD40L. See Example 6.

[0556] It is furthermore envisaged that the binding of the first binding domain of the antibody constructs of the invention to human CD70 is reduced by the presence of soluble CD27 by ≦25%, preferably ≦20%, more preferably ≦15%, more preferably ≦10%, even more preferably ≦5%, and most preferably ≦2%. It is envisaged that the concentration of CD27 in this context is physiological, e.g., between about 100 and about 500 pg/ml, or even higher, e.g., up to 1 μg/ml. For details of the assay see Example 16.

[0557] The CD70×CD3 bispecific antibody constructs of the invention are also envisaged to have a turbidity (as measured by OD340 after concentration of purified monomeric antibody construct to 2.5 mg/ml and over night incubation) of ≦0.2, preferably of ≦0.15, more preferably of ≦0.12, even more preferably of ≦0.1, and most preferably of ≦0.08 or ≦0.05. See Example 12.

[0558] The CD70×CD3 bispecific antibody constructs of the invention are also envisaged to not be internalized or to not undergo significant internalization by the target cell. Changes in the potency of the CD70×CD3 bispecific antibody construct as a function of preincubation of the construct on the target cells in the absence of T cells can be measured. If the antibody construct is internalized, it should undergo lysosomal degradation. The effective concentration should decrease with time, and thus the apparent potency should decrease as well. The effect is observed with other targets, for which this is a known phenomenon.

[0559] The rate of internalization can be assayed e.g. as follows: T cells are counted and diluted to a concentration of 1×10⁵/ml in assay media. CD70 positive (e.g. natural expresser) cells are counted and plated at 2500 cells per well (cpw). The antibody construct is diluted serially 1:2, at a starting concentration of 100 nM. The antibody construct is added to the culture assay plates to allow for 0 hours, 1 hour or 2 hours of incubation prior to addition of the T cells. Then the T cells are plated at 25000 cpw, and the assay is incubated for 48 hours at 37° C. Target cell survival is analyzed e.g. with the Steady-Glo® system (25 μl/well). Preferably, the internalization rate is ≦20% after a 2 hour (pre-)incubation of the antibody construct with the target cell, more preferably ≦15%, even more preferably ≦10%, and most preferably ≦5%.

[0560] In a further embodiment the antibody construct according to the invention is stable at acidic pH. The more tolerant the antibody construct behaves at unphysiologic pH such as pH 5.5 (a pH which is required to run e.g. a cation exchange chromatography), the higher is the recovery of the antibody construct eluted from an ion exchange column relative to the total amount of loaded protein. Recovery of the antibody construct from an ion (e.g., cation) exchange column at pH 5.5 is preferably ≧50%, more preferably ≧60% or ≧65%, even more preferably ≧70% or ≧72% or ≧74% or ≧76% or ≧78%, even more preferably ≧80%, even more preferably ≧90%, even more preferably ≧95%, and most preferably ≧99%. See Example 13.

[0561] It is furthermore envisaged that the bispecific antibody constructs of the present invention exhibit therapeutic efficacy or anti-tumor activity. This can e.g. be assessed in a study as disclosed in the following example of an advanced stage human tumor xenograft model:

[0562] On day 1 of the study, 5×10⁶ cells of a human CD70 positive cancer cell line are subcutaneously injected in the right dorsal flank of female NOD/SCID mice. When the mean tumor volume reaches about 100 mm³, in vitro expanded human CD3 positive T cells are transplanted into the mice by injection of about 2×10⁷ cells into the peritoneal cavity of the animals. Mice of vehicle control group 1 do not receive effector cells and are used as an untransplanted control for comparison with vehicle control group 2 (receiving effector cells) to monitor the impact of T cells alone on tumor growth. The antibody treatment starts when the mean tumor volume reaches about 200 mm3. The mean tumor size of each treatment group on the day of treatment start should not be statistically different from any other group (analysis of variance). Mice are treated with 0.5 mg/kg/day of a CD70×CD3 bispecific antibody construct by intravenous bolus injection for about 15 to 20 days. Tumors are measured by caliper during the study and progress evaluated by intergroup comparison of tumor volumes (TV). The tumor growth inhibition T/C [%] is determined by calculating TV as T/C %=100×(median TV of analyzed group)/(median TV of control group 2).

[0563] The skilled person knows how to modify or adapt certain parameters of this study, such as the number of injected tumor cells, the site of injection, the number of transplanted human T cells, the amount of bispecific antibody constructs to be administered, and the timelines, while still arriving at a meaningful and reproducible result. Preferably, the tumor growth inhibition T/C [%] is ≦70 or ≦60, more preferably ≦50 or ≦40, even more preferably ≦30 or ≦20 and most preferably ≦10 or ≦5 or even ≦2.5.

[0564] The invention further provides a polynucleotide/nucleic acid molecule encoding an antibody construct of the invention.

[0565] A polynucleotide is a biopolymer composed of 13 or more nucleotide monomers covalently bonded in a chain. DNA (such as cDNA) and RNA (such as mRNA) are examples of polynucleotides with distinct biological function. Nucleotides are organic molecules that serve as the monomers or subunits of nucleic acid molecules like DNA or RNA. The nucleic acid molecule or polynucleotide can be double stranded and single stranded, linear and circular. It is preferably comprised in a vector which is preferably comprised in a host cell. Said host cell is, e.g. after transformation or transfection with the vector or the polynucleotide of the invention, capable of expressing the antibody construct. For that purpose the polynucleotide or nucleic acid molecule is operatively linked with control sequences.

[0566] The genetic code is the set of rules by which information encoded within genetic material (nucleic acids) is translated into proteins. Biological decoding in living cells is accomplished by the ribosome which links amino acids in an order specified by mRNA, using tRNA molecules to carry amino acids and to read the mRNA three nucleotides at a time. The code defines how sequences of these nucleotide triplets, called codons, specify which amino acid will be added next during protein synthesis. With some exceptions, a three-nucleotide codon in a nucleic acid sequence specifies a single amino acid. Because the vast majority of genes are encoded with exactly the same code, this particular code is often referred to as the canonical or standard genetic code. While the genetic code determines the protein sequence for a given coding region, other genomic regions can influence when and where these proteins are produced.

[0567] Furthermore, the invention provides a vector comprising a polynucleotide/nucleic acid molecule of the invention.

[0568] A vector is a nucleic acid molecule used as a vehicle to transfer (foreign) genetic material into a cell. The term “vector” encompasses—but is not restricted to—plasmids, viruses, cosmids and artificial chromosomes. In general, engineered vectors comprise an origin of replication, a multicloning site and a selectable marker. The vector itself is generally a nucleotide sequence, commonly a DNA sequence, that comprises an insert (transgene) and a larger sequence that serves as the “backbone” of the vector. Modern vectors may encompass additional features besides the transgene insert and a backbone: promoter, genetic marker, antibiotic resistance, reporter gene, targeting sequence, protein purification tag. Vectors called expression vectors (expression constructs) specifically are for the expression of the transgene in the target cell, and generally have control sequences.

[0569] The term “control sequences” refers to DNA sequences necessary for the expression of an operably linked coding sequence in a particular host organism. The control sequences that are suitable for prokaryotes, for example, include a promoter, optionally an operator sequence, and a ribosome binding site. Eukaryotic cells are known to utilize promoters, polyadenylation signals, and enhancers.

[0570] A nucleic acid is “operably linked” when it is placed into a functional relationship with another nucleic acid sequence. For example, DNA for a presequence or secretory leader is operably linked to DNA for a polypeptide if it is expressed as a preprotein that participates in the secretion of the polypeptide; a promoter or enhancer is operably linked to a coding sequence if it affects the transcription of the sequence; or a ribosome binding site is operably linked to a coding sequence if it is positioned so as to facilitate translation. Generally, “operably linked” means that the DNA sequences being linked are contiguous, and, in the case of a secretory leader, contiguous and in reading phase. However, enhancers do not have to be contiguous. Linking is accomplished by ligation at convenient restriction sites. If such sites do not exist, the synthetic oligonucleotide adaptors or linkers are used in accordance with conventional practice.

[0571] “Transfection” is the process of deliberately introducing nucleic acid molecules or polynucleotides (including vectors) into target cells. The term is mostly used for non-viral methods in eukaryotic cells. Transduction is often used to describe virus-mediated transfer of nucleic acid molecules or polynucleotides. Transfection of animal cells typically involves opening transient pores or “holes” in the cell membrane, to allow the uptake of material. Transfection can be carried out using calcium phosphate, by electroporation, by cell squeezing or by mixing a cationic lipid with the material to produce liposomes, which fuse with the cell membrane and deposit their cargo inside.

[0572] The term “transformation” is used to describe non-viral transfer of nucleic acid molecules or polynucleotides (including vectors) into bacteria, and also into non-animal eukaryotic cells, including plant cells. Transformation is hence the genetic alteration of a bacterial or non-animal eukaryotic cell resulting from the direct uptake through the cell membrane(s) from its surroundings and subsequent incorporation of exogenous genetic material (nucleic acid molecules). Transformation can be effected by artificial means. For transformation to happen, cells or bacteria must be in a state of competence, which might occur as a time-limited response to environmental conditions such as starvation and cell density.

[0573] Moreover, the invention provides a host cell transformed or transfected with the polynucleotide/nucleic acid molecule or with the vector of the invention.

[0574] As used herein, the terms “host cell” or “recipient cell” are intended to include any individual cell or cell culture that can be or has/have been recipients of vectors, exogenous nucleic acid molecules, and polynucleotides encoding the antibody construct of the present invention; and/or recipients of the antibody construct itself. The introduction of the respective material into the cell is carried out by way of transformation, transfection and the like. The term “host cell” is also intended to include progeny or potential progeny of a single cell. Because certain modifications may occur in succeeding generations due to either natural, accidental, or deliberate mutation or due to environmental influences, such progeny may not, in fact, be completely identical (in morphology or in genomic or total DNA complement) to the parent cell, but is still included within the scope of the term as used herein. Suitable host cells include prokaryotic or eukaryotic cells, and also include but are not limited to bacteria, yeast cells, fungi cells, plant cells, and animal cells such as insect cells and mammalian cells, e.g., murine, rat, macaque or human.

[0575] The antibody construct of the invention can be produced in bacteria. After expression, the antibody construct of the invention is isolated from the E. coli cell paste in a soluble fraction and can be purified through, e.g., affinity chromatography and/or size exclusion. Final purification can be carried out similar to the process for purifying antibody expressed e.g., in CHO cells.

[0576] In addition to prokaryotes, eukaryotic microbes such as filamentous fungi or yeast are suitable cloning or expression hosts for the antibody construct of the invention. Saccharomyces cerevisiae, or common baker's yeast, is the most commonly used among lower eukaryotic host microorganisms. However, a number of other genera, species, and strains are commonly available and useful herein, such as Schizosaccharomyces pombe, Kluyveromyces hosts such as K. lactis, K. fragilis (ATCC 12424), K. bulgaricus (ATCC 16045), K. wickeramii (ATCC 24178), K. waltii (ATCC 56500), K. drosophilarum (ATCC 36906), K. thermotolerans, and K. marxianus; yarrowia (EP 402 226); Pichia pastoris (EP 183 070); Candida; Trichoderma reesia (EP 244 234); Neurospora crassa; Schwanniomyces such as Schwanniomyces occidentalis; and filamentous fungi such as Neurospora, Penicillium, Tolypocladium, and Aspergillus hosts such as A. nidulans and A. niger.

[0577] Suitable host cells for the expression of glycosylated antibody construct of the invention are derived from multicellular organisms. Examples of invertebrate cells include plant and insect cells. Numerous baculoviral strains and variants and corresponding permissive insect host cells from hosts such as Spodoptera frugiperda (caterpillar), Aedes aegypti (mosquito), Aedes albopictus (mosquito), Drosophila melanogaster (fruit fly), and Bombyx mori have been identified. A variety of viral strains for transfection are publicly available, e.g., the L-1 variant of Autographa californica NPV and the Bm-5 strain of Bombyx mori NPV, and such viruses may be used as the virus herein according to the present invention, particularly for transfection of Spodoptera frugiperda cells.

[0578] Plant cell cultures of cotton, corn, potato, soybean, petunia, tomato, Arabidopsis and tobacco can also be used as hosts. Cloning and expression vectors useful in the production of proteins in plant cell culture are known to those of skill in the art. See e.g. Hiatt et al., Nature (1989) 342: 76-78, Owen et al. (1992) Bio/Technology 10: 790-794, Artsaenko et al. (1995) The Plant J 8: 745-750, and Fecker et al. (1996) Plant Mol Biol 32: 979-986.

[0579] However, interest has been greatest in vertebrate cells, and propagation of vertebrate cells in culture (tissue culture) has become a routine procedure. Examples of useful mammalian host cell lines are monkey kidney CV1 line transformed by SV40 (COS-7, ATCC CRL 1651); human embryonic kidney line (293 or 293 cells subcloned for growth in suspension culture, Graham et al., J. Gen Virol. 36: 59 (1977)); baby hamster kidney cells (BHK, ATCC CCL 10); Chinese hamster ovary cells/-DHFR (CHO, Urlaub et al., Proc. Natl. Acad. Sci. USA 77: 4216 (1980)); mouse sertoli cells (TM4, Mather, Biol. Reprod. 23: 243-251 (1980)); monkey kidney cells (CVI ATCC CCL 70); African green monkey kidney cells (VERO-76, ATCC CRL1587); human cervical carcinoma cells (HELA, ATCC CCL 2); canine kidney cells (MDCK, ATCC CCL 34); buffalo rat liver cells (BRL 3A, ATCC CRL 1442); human lung cells (W138, ATCC CCL 75); human liver cells (Hep G2,1413 8065); mouse mammary tumor (MMT 060562, ATCC CCL5 1); TRI cells (Mather et al., Annals N. Y Acad. Sci. (1982) 383: 44-68); MRC 5 cells; FS4 cells; and a human hepatoma line (Hep G2).

[0580] In a further embodiment the invention provides a process for the production of an antibody construct of the invention, said process comprising culturing a host cell of the invention under conditions allowing the expression of the antibody construct of the invention and recovering the produced antibody construct from the culture.

[0581] As used herein, the term “culturing” refers to the in vitro maintenance, differentiation, growth, proliferation and/or propagation of cells under suitable conditions in a medium. The term “expression” includes any step involved in the production of an antibody construct of the invention including, but not limited to, transcription, post-transcriptional modification, translation, post-translational modification, and secretion.

[0582] When using recombinant techniques, the antibody construct can be produced intracellularly, in the periplasmic space, or directly secreted into the medium. If the antibody construct is produced intracellularly, as a first step, the particulate debris, either host cells or lysed fragments, are removed, for example, by centrifugation or ultrafiltration. Carter et al., Bio/Technology 10: 163-167 (1992) describe a procedure for isolating antibodies which are secreted to the periplasmic space of E. coli. Briefly, cell paste is thawed in the presence of sodium acetate (pH 3.5), EDTA, and phenylmethylsulfonylfluoride (PMSF) over about 30 min. Cell debris can be removed by centrifugation. Where the antibody is secreted into the medium, supernatants from such expression systems are generally first concentrated using a commercially available protein concentration filter, for example, an Amicon or Millipore Pellicon ultrafiltration unit. A protease inhibitor such as PMSF may be included in any of the foregoing steps to inhibit proteolysis and antibiotics may be included to prevent the growth of adventitious contaminants.

[0583] The antibody construct of the invention prepared from the host cells can be recovered or purified using, for example, hydroxylapatite chromatography, gel electrophoresis, dialysis, and affinity chromatography. Other techniques for protein purification such as fractionation on an ion-exchange column, ethanol precipitation, Reverse Phase HPLC, chromatography on silica, chromatography on heparin SEPHAROSE™, chromatography on an anion or cation exchange resin (such as a polyaspartic acid column), chromato-focusing, SDS-PAGE, and ammonium sulfate precipitation are also available depending on the antibody to be recovered. Where the antibody construct of the invention comprises a CH3 domain, the Bakerbond ABX resin (J. T. Baker, Phillipsburg, N.J.) is useful for purification.

[0584] Affinity chromatography is a preferred purification technique. The matrix to which the affinity ligand is attached is most often agarose, but other matrices are available. Mechanically stable matrices such as controlled pore glass or poly (styrenedivinyl) benzene allow for faster flow rates and shorter processing times than can be achieved with agarose.

[0585] Moreover, the invention provides a pharmaceutical composition comprising an antibody construct of the invention or an antibody construct produced according to the process of the invention.

[0586] As used herein, the term “pharmaceutical composition” relates to a composition which is suitable for administration to a patient, preferably a human patient. The particularly preferred pharmaceutical composition of this invention comprises one or a plurality of the antibody construct(s) of the invention, preferably in a therapeutically effective amount. Preferably, the pharmaceutical composition further comprises suitable formulations of one or more (pharmaceutically effective) carriers, stabilizers, excipients, diluents, solubilizers, surfactants, emulsifiers, preservatives and/or adjuvants. Acceptable constituents of the composition are preferably nontoxic to recipients at the dosages and concentrations employed. Pharmaceutical compositions of the invention include, but are not limited to, liquid, frozen, and lyophilized compositions.

[0587] The inventive compositions may comprise a pharmaceutically acceptable carrier. In general, as used herein, “pharmaceutically acceptable carrier” means any and all aqueous and non-aqueous solutions, sterile solutions, solvents, buffers, e.g. phosphate buffered saline (PBS) solutions, water, suspensions, emulsions, such as oil/water emulsions, various types of wetting agents, liposomes, dispersion media and coatings, which are compatible with pharmaceutical administration, in particular with parenteral administration. The use of such media and agents in pharmaceutical compositions is well known in the art, and the compositions comprising such carriers can be formulated by well-known conventional methods.

[0588] Certain embodiments provide pharmaceutical compositions comprising the antibody construct of the invention and further one or more excipients such as those illustratively described in this section and elsewhere herein. Excipients can be used in the invention in this regard for a wide variety of purposes, such as adjusting physical, chemical, or biological properties of formulations, such as adjustment of viscosity, and or processes of the invention to improve effectiveness and or to stabilize such formulations and processes against degradation and spoilage due to, for instance, stresses that occur during manufacturing, shipping, storage, pre-use preparation, administration, and thereafter.

[0589] In certain embodiments, the pharmaceutical composition may contain formulation materials for the purpose of modifying, maintaining or preserving, e.g., the pH, osmolarity, viscosity, clarity, color, isotonicity, odor, sterility, stability, rate of dissolution or release, adsorption or penetration of the composition (see, REMINGTON'S PHARMACEUTICAL SCIENCES, 18″ Edition, (A. R. Genrmo, ed.), 1990, Mack Publishing Company). In such embodiments, suitable formulation materials may include, but are not limited to:
[0590] amino acids such as glycine, alanine, glutamine, asparagine, threonine, proline, 2-phenylalanine, including charged amino acids, preferably lysine, lysine acetate, arginine, glutamate and/or histidine
[0591] antimicrobials such as antibacterial and antifungal agents
[0592] antioxidants such as ascorbic acid, methionine, sodium sulfite or sodium hydrogen-sulfite;
[0593] buffers, buffer systems and buffering agents which are used to maintain the composition at physiological pH or at a slightly lower pH, typically within a pH range of from about 5 to about 8 or 9; examples of buffers are borate, bicarbonate, Tris-HCl, citrates, phosphates or other organic acids, succinate, phosphate, histidine and acetate; for example Tris buffer of about pH 7.0-8.5, or acetate buffer of about pH 4.0-5.5;
[0594] non-aqueous solvents such as propylene glycol, polyethylene glycol, vegetable oils such as olive oil, and injectable organic esters such as ethyl oleate;
[0595] aqueous carriers including water, alcoholic/aqueous solutions, emulsions or suspensions, including saline and buffered media;
[0596] biodegradable polymers such as polyesters;
[0597] bulking agents such as mannitol or glycine;
[0598] chelating agents such as ethylenediamine tetraacetic acid (EDTA);
[0599] isotonic and absorption delaying agents;
[0600] complexing agents such as caffeine, polyvinylpyrrolidone, beta-cyclodextrin or hydroxypropyl-beta-cyclodextrin)
[0601] fillers;
[0602] monosaccharides; disaccharides; and other carbohydrates (such as glucose, mannose or dextrins); carbohydrates may be non-reducing sugars, preferably trehalose, sucrose, octasulfate, sorbitol or xylitol;
[0603] (low molecular weight) proteins, polypeptides or proteinaceous carriers such as human or bovine serum albumin, gelatin or immunoglobulins, preferably of human origin;
[0604] coloring and flavouring agents;
[0605] sulfur containing reducing agents, such as glutathione, thioctic acid, sodium thioglycolate, thioglycerol, [alpha]-monothioglycerol, and sodium thio sulfate
[0606] diluting agents;
[0607] emulsifying agents;
[0608] hydrophilic polymers such as polyvinylpyrrolidone)
[0609] salt-forming counter-ions such as sodium;
[0610] preservatives such as antimicrobials, anti-oxidants, chelating agents, inert gases and the like; examples are: benzalkonium chloride, benzoic acid, salicylic acid, thimerosal, phenethyl alcohol, methylparaben, propylparaben, chlorhexidine, sorbic acid or hydrogen peroxide);
[0611] metal complexes such as Zn-protein complexes;
[0612] solvents and co-solvents (such as glycerin, propylene glycol or polyethylene glycol);
[0613] sugars and sugar alcohols, such as trehalose, sucrose, octasulfate, mannitol, sorbitol or xylitol stachyose, mannose, sorbose, xylose, ribose, myoinisitose, galactose, lactitol, ribitol, myoinisitol, galactitol, glycerol, cyclitols (e.g., inositol), polyethylene glycol; and polyhydric sugar alcohols;
[0614] suspending agents;
[0615] surfactants or wetting agents such as pluronics, PEG, sorbitan esters, polysorbates such as polysorbate 20, polysorbate, triton, tromethamine, lecithin, cholesterol, tyloxapal; surfactants may be detergents, preferably with a molecular weight of >1.2 KD and/or a polyether, preferably with a molecular weight of >3 KD; non-limiting examples for preferred detergents are Tween 20, Tween 40, Tween 60, Tween 80 and Tween 85; non-limiting examples for preferred polyethers are PEG 3000, PEG 3350, PEG 4000 and PEG 5000;
[0616] stability enhancing agents such as sucrose or sorbitol;
[0617] tonicity enhancing agents such as alkali metal halides, preferably sodium or potassium chloride, mannitol sorbitol;
[0618] parenteral delivery vehicles including sodium chloride solution, Ringer's dextrose, dextrose and sodium chloride, lactated Ringer's, or fixed oils;
[0619] intravenous delivery vehicles including fluid and nutrient replenishers, electrolyte replenishers (such as those based on Ringer's dextrose).

[0620] It is evident to those skilled in the art that the different constituents of the pharmaceutical composition (e.g., those listed above) can have different effects, for example, and amino acid can act as a buffer, a stabilizer and/or an antioxidant; mannitol can act as a bulking agent and/or a tonicity enhancing agent; sodium chloride can act as delivery vehicle and/or tonicity enhancing agent; etc.

[0621] It is envisaged that the composition of the invention might comprise, in addition to the polypeptide of the invention defined herein, further biologically active agents, depending on the intended use of the composition. Such agents might be drugs acting on the gastrointestinal system, drugs acting as cytostatica, drugs preventing hyperurikemia, drugs inhibiting immunoreactions (e.g. corticosteroids), drugs modulating the inflammatory response, drugs acting on the circulatory system and/or agents such as cytokines known in the art. It is also envisaged that the antibody construct of the present invention is applied in a co-therapy, i.e., in combination with another anti-cancer medicament.

[0622] In certain embodiments, the optimal pharmaceutical composition will be determined by one skilled in the art depending upon, for example, the intended route of administration, delivery format and desired dosage. See, for example, REMINGTON'S PHARMACEUTICAL SCIENCES, supra. In certain embodiments, such compositions may influence the physical state, stability, rate of in vivo release and rate of in vivo clearance of the antibody construct of the invention. In certain embodiments, the primary vehicle or carrier in a pharmaceutical composition may be either aqueous or non-aqueous in nature. For example, a suitable vehicle or carrier may be water for injection, physiological saline solution or artificial cerebrospinal fluid, possibly supplemented with other materials common in compositions for parenteral administration. Neutral buffered saline or saline mixed with serum albumin are further exemplary vehicles. In certain embodiments, the antibody construct of the invention compositions may be prepared for storage by mixing the selected composition having the desired degree of purity with optional formulation agents (REMINGTON'S PHARMACEUTICAL SCIENCES, supra) in the form of a lyophilized cake or an aqueous solution. Further, in certain embodiments, the antibody construct of the invention may be formulated as a lyophilizate using appropriate excipients such as sucrose.

[0623] When parenteral administration is contemplated, the therapeutic compositions for use in this invention may be provided in the form of a pyrogen-free, parenterally acceptable aqueous solution comprising the desired antibody construct of the invention in a pharmaceutically acceptable vehicle. A particularly suitable vehicle for parenteral injection is sterile distilled water in which the antibody construct of the invention is formulated as a sterile, isotonic solution, properly preserved. In certain embodiments, the preparation can involve the formulation of the desired molecule with an agent, such as injectable microspheres, bio-erodible particles, polymeric compounds (such as polylactic acid or polyglycolic acid), beads or liposomes, that may provide controlled or sustained release of the product which can be delivered via depot injection. In certain embodiments, hyaluronic acid may also be used, having the effect of promoting sustained duration in the circulation. In certain embodiments, implantable drug delivery devices may be used to introduce the desired antibody construct.

[0624] Additional pharmaceutical compositions will be evident to those skilled in the art, including formulations involving the antibody construct of the invention in sustained- or controlled-delivery/release formulations. Techniques for formulating a variety of other sustained- or controlled-delivery means, such as liposome carriers, bio-erodible microparticles or porous beads and depot injections, are also known to those skilled in the art. See, for example, International Patent Application No. PCT/US93/00829, which describes controlled release of porous polymeric microparticles for delivery of pharmaceutical compositions. Sustained-release preparations may include semipermeable polymer matrices in the form of shaped articles, e.g., films, or microcapsules. Sustained release matrices may include polyesters, hydrogels, polylactides (as disclosed in U.S. Pat. No. 3,773,919 and European Patent Application Publication No. EP 058481), copolymers of L-glutamic acid and gamma ethyl-L-glutamate (Sidman et al., 1983, Biopolymers 2:547-556), poly (2-hydroxyethyl-methacrylate) (Langer et al., 1981, J. Biomed. Mater. Res. 15:167-277 and Langer, 1982, Chem. Tech. 12:98-105), ethylene vinyl acetate (Langer et al., 1981, supra) or poly-D(−)-3-hydroxybutyric acid (European Patent Application Publication No. EP 133,988). Sustained release compositions may also include liposomes that can be prepared by any of several methods known in the art. See, e.g., Eppstein et al., 1985, Proc. Natl. Acad. Sci. U.S.A. 82:3688-3692; European Patent Application Publication Nos. EP 036,676; EP 088,046 and EP 143,949.

[0625] The antibody construct may also be entrapped in microcapsules prepared, for example, by coacervation techniques or by interfacial polymerization (for example, hydroxymethylcellulose or gelatine-microcapsules and poly (methylmethacylate) microcapsules, respectively), in colloidal drug delivery systems (for example, liposomes, albumin microspheres, microemulsions, nanoparticles and nanocapsules), or in macroemulsions. Such techniques are disclosed in Remington's Pharmaceutical Sciences, 16th edition, Oslo, A., Ed., (1980).

[0626] Pharmaceutical compositions used for in vivo administration are typically provided as sterile preparations. Sterilization can be accomplished by filtration through sterile filtration membranes. When the composition is lyophilized, sterilization using this method may be conducted either prior to or following lyophilization and reconstitution. Compositions for parenteral administration can be stored in lyophilized form or in a solution. Parenteral compositions generally are placed into a container having a sterile access port, for example, an intravenous solution bag or vial having a stopper pierceable by a hypodermic injection needle.

[0627] Another aspect of the invention includes self-buffering antibody construct of the invention formulations, which can be used as pharmaceutical compositions, as described in international patent application WO 06138181A2 (PCT/US2006/022599). A variety of expositions are available on protein stabilization and formulation materials and methods useful in this regard, such as Arakawa et al., “Solvent interactions in pharmaceutical formulations,” Pharm Res. 8(3): 285-91 (1991); Kendrick et al., “Physical stabilization of proteins in aqueous solution” in: RATIONAL DESIGN OF STABLE PROTEIN FORMULATIONS: THEORY AND PRACTICE, Carpenter and Manning, eds. Pharmaceutical Biotechnology. 13: 61-84 (2002), and Randolph et al., “Surfactant-protein interactions”, Pharm Biotechnol. 13: 159-75 (2002), see particularly the parts pertinent to excipients and processes of the same for self-buffering protein formulations in accordance with the current invention, especially as to protein pharmaceutical products and processes for veterinary and/or human medical uses.

[0628] Salts may be used in accordance with certain embodiments of the invention to, for example, adjust the ionic strength and/or the isotonicity of a formulation and/or to improve the solubility and/or physical stability of a protein or other ingredient of a composition in accordance with the invention. As is well known, ions can stabilize the native state of proteins by binding to charged residues on the protein's surface and by shielding charged and polar groups in the protein and reducing the strength of their electrostatic interactions, attractive, and repulsive interactions. Ions also can stabilize the denatured state of a protein by binding to, in particular, the denatured peptide linkages (—CONH) of the protein. Furthermore, ionic interaction with charged and polar groups in a protein also can reduce intermolecular electrostatic interactions and, thereby, prevent or reduce protein aggregation and insolubility.

[0629] Ionic species differ significantly in their effects on proteins. A number of categorical rankings of ions and their effects on proteins have been developed that can be used in formulating pharmaceutical compositions in accordance with the invention. One example is the Hofmeister series, which ranks ionic and polar non-ionic solutes by their effect on the conformational stability of proteins in solution. Stabilizing solutes are referred to as “kosmotropic”. Destabilizing solutes are referred to as “chaotropic”. Kosmotropes commonly are used at high concentrations (e.g., >1 molar ammonium sulfate) to precipitate proteins from solution (“salting-out”). Chaotropes commonly are used to denture and/or to solubilize proteins (“salting-in”). The relative effectiveness of ions to “salt-in” and “salt-out” defines their position in the Hofmeister series.

[0630] Free amino acids can be used in the antibody construct of the invention formulations in accordance with various embodiments of the invention as bulking agents, stabilizers, and antioxidants, as well as other standard uses. Lysine, proline, serine, and alanine can be used for stabilizing proteins in a formulation. Glycine is useful in lyophilization to ensure correct cake structure and properties. Arginine may be useful to inhibit protein aggregation, in both liquid and lyophilized formulations. Methionine is useful as an antioxidant.

[0631] Polyols include sugars, e.g., mannitol, sucrose, and sorbitol and polyhydric alcohols such as, for instance, glycerol and propylene glycol, and, for purposes of discussion herein, polyethylene glycol (PEG) and related substances. Polyols are kosmotropic. They are useful stabilizing agents in both liquid and lyophilized formulations to protect proteins from physical and chemical degradation processes. Polyols also are useful for adjusting the tonicity of formulations. Among polyols useful in select embodiments of the invention is mannitol, commonly used to ensure structural stability of the cake in lyophilized formulations. It ensures structural stability to the cake. It is generally used with a lyoprotectant, e.g., sucrose. Sorbitol and sucrose are among preferred agents for adjusting tonicity and as stabilizers to protect against freeze-thaw stresses during transport or the preparation of bulks during the manufacturing process. Reducing sugars (which contain free aldehyde or ketone groups), such as glucose and lactose, can glycate surface lysine and arginine residues. Therefore, they generally are not among preferred polyols for use in accordance with the invention. In addition, sugars that form such reactive species, such as sucrose, which is hydrolyzed to fructose and glucose under acidic conditions, and consequently engenders glycation, also is not among preferred polyols of the invention in this regard. PEG is useful to stabilize proteins and as a cryoprotectant and can be used in the invention in this regard.

[0632] Embodiments of the antibody construct of the invention formulations further comprise surfactants. Protein molecules may be susceptible to adsorption on surfaces and to denaturation and consequent aggregation at air-liquid, solid-liquid, and liquid-liquid interfaces. These effects generally scale inversely with protein concentration. These deleterious interactions generally scale inversely with protein concentration and typically are exacerbated by physical agitation, such as that generated during the shipping and handling of a product. Surfactants routinely are used to prevent, minimize, or reduce surface adsorption. Useful surfactants in the invention in this regard include polysorbate 20, polysorbate 80, other fatty acid esters of sorbitan polyethoxylates, and poloxamer 188. Surfactants also are commonly used to control protein conformational stability. The use of surfactants in this regard is protein-specific since, any given surfactant typically will stabilize some proteins and destabilize others.

[0633] Polysorbates are susceptible to oxidative degradation and often, as supplied, contain sufficient quantities of peroxides to cause oxidation of protein residue side-chains, especially methionine. Consequently, polysorbates should be used carefully, and when used, should be employed at their lowest effective concentration. In this regard, polysorbates exemplify the general rule that excipients should be used in their lowest effective concentrations.

[0634] Embodiments of the antibody construct of the invention formulations further comprise one or more antioxidants. To some extent deleterious oxidation of proteins can be prevented in pharmaceutical formulations by maintaining proper levels of ambient oxygen and temperature and by avoiding exposure to light. Antioxidant excipients can be used as well to prevent oxidative degradation of proteins. Among useful antioxidants in this regard are reducing agents, oxygen/free-radical scavengers, and chelating agents. Antioxidants for use in therapeutic protein formulations in accordance with the invention preferably are water-soluble and maintain their activity throughout the shelf life of a product. EDTA is a preferred antioxidant in accordance with the invention in this regard. Antioxidants can damage proteins. For instance, reducing agents, such as glutathione in particular, can disrupt intramolecular disulfide linkages. Thus, antioxidants for use in the invention are selected to, among other things, eliminate or sufficiently reduce the possibility of themselves damaging proteins in the formulation.

[0635] Formulations in accordance with the invention may include metal ions that are protein co-factors and that are necessary to form protein coordination complexes, such as zinc necessary to form certain insulin suspensions. Metal ions also can inhibit some processes that degrade proteins. However, metal ions also catalyze physical and chemical processes that degrade proteins. Magnesium ions (10-120 mM) can be used to inhibit isomerization of aspartic acid to isoaspartic acid. Ca+2 ions (up to 100 mM) can increase the stability of human deoxyribonuclease. Mg+2, Mn+2, and Zn+2, however, can destabilize rhDNase. Similarly, Ca+2 and Sr+2 can stabilize Factor VIII, it can be destabilized by Mg+2, Mn+2 and Zn+2, Cu+2 and Fe+2, and its aggregation can be increased by Al+3 ions.

[0636] Embodiments of the antibody construct of the invention formulations further comprise one or more preservatives. Preservatives are necessary when developing multi-dose parenteral formulations that involve more than one extraction from the same container. Their primary function is to inhibit microbial growth and ensure product sterility throughout the shelf-life or term of use of the drug product. Commonly used preservatives include benzyl alcohol, phenol and m-cresol. Although preservatives have a long history of use with small-molecule parenterals, the development of protein formulations that includes preservatives can be challenging. Preservatives almost always have a destabilizing effect (aggregation) on proteins, and this has become a major factor in limiting their use in multi-dose protein formulations. To date, most protein drugs have been formulated for single-use only. However, when multi-dose formulations are possible, they have the added advantage of enabling patient convenience, and increased marketability. A good example is that of human growth hormone (hGH) where the development of preserved formulations has led to commercialization of more convenient, multi-use injection pen presentations. At least four such pen devices containing preserved formulations of hGH are currently available on the market. Norditropin (liquid, Novo Nordisk), Nutropin AQ (liquid, Genentech) & Genotropin (lyophilized—dual chamber cartridge, Pharmacia & Upjohn) contain phenol while Somatrope (Eli Lilly) is formulated with m-cresol. Several aspects need to be considered during the formulation and development of preserved dosage forms. The effective preservative concentration in the drug product must be optimized. This requires testing a given preservative in the dosage form with concentration ranges that confer anti-microbial effectiveness without compromising protein stability.

[0637] As might be expected, development of liquid formulations containing preservatives are more challenging than lyophilized formulations. Freeze-dried products can be lyophilized without the preservative and reconstituted with a preservative containing diluent at the time of use. This shortens the time for which a preservative is in contact with the protein, significantly minimizing the associated stability risks. With liquid formulations, preservative effectiveness and stability should be maintained over the entire product shelf-life (about 18 to 24 months). An important point to note is that preservative effectiveness should be demonstrated in the final formulation containing the active drug and all excipient components.

[0638] The antibody constructs disclosed herein may also be formulated as immuno-liposomes. A “liposome” is a small vesicle composed of various types of lipids, phospholipids and/or surfactant which is useful for delivery of a drug to a mammal. The components of the liposome are commonly arranged in a bilayer formation, similar to the lipid arrangement of biological membranes. Liposomes containing the antibody construct are prepared by methods known in the art, such as described in Epstein et al., Proc. Natl. Acad. Sci. USA, 82: 3688 (1985); Hwang et al., Proc. Natl Acad. Sci. USA, 77: 4030 (1980); U.S. Pat. Nos. 4,485,045 and 4,544,545; and WO 97/38731. Liposomes with enhanced circulation time are disclosed in U.S. Pat. No. 5,013,556. Particularly useful liposomes can be generated by the reverse phase evaporation method with a lipid composition comprising phosphatidylcholine, cholesterol and PEG-derivatized phosphatidylethanolamine (PEG-PE). Liposomes are extruded through filters of defined pore size to yield liposomes with the desired diameter. Fab′ fragments of the antibody construct of the present invention can be conjugated to the liposomes as described in Martin et al. J. Biol. Chem. 257: 286-288 (1982) via a disulfide interchange reaction. A chemotherapeutic agent is optionally contained within the liposome. See Gabizon et al. J. National Cancer Inst. 81 (19) 1484 (1989).

[0639] Once the pharmaceutical composition has been formulated, it may be stored in sterile vials as a solution, suspension, gel, emulsion, solid, crystal, or as a dehydrated or lyophilized powder. Such formulations may be stored either in a ready-to-use form or in a form (e.g., lyophilized) that is reconstituted prior to administration.

[0640] The biological activity of the pharmaceutical composition defined herein can be determined for instance by cytotoxicity assays, as described in the following examples, in WO 99/54440 or by Schlereth et al. (Cancer Immunol. Immunother. 20 (2005), 1-12). “Efficacy” or “in vivo efficacy” as used herein refers to the response to therapy by the pharmaceutical composition of the invention, using e.g. standardized NCI response criteria. The success or in vivo efficacy of the therapy using a pharmaceutical composition of the invention refers to the effectiveness of the composition for its intended purpose, i.e. the ability of the composition to cause its desired effect, i.e. depletion of pathologic cells, e.g. tumor cells. The in vivo efficacy may be monitored by established standard methods for the respective disease entities including, but not limited to white blood cell counts, differentials, Fluorescence Activated Cell Sorting, bone marrow aspiration. In addition, various disease specific clinical chemistry parameters and other established standard methods may be used. Furthermore, computer-aided tomography, X-ray, nuclear magnetic resonance tomography (e.g. for National Cancer Institute-criteria based response assessment [Cheson B D, Horning S J, Coiffier B, Shipp M A, Fisher R I, Connors J M, Lister T A, Vose J, Grillo-Lopez A, Hagenbeek A, Cabanillas F, Klippensten D, Hiddemann W, Castellino R, Harris N L, Armitage J O, Carter W, Hoppe R, Canellos G P. Report of an international workshop to standardize response criteria for non-Hodgkin's lymphomas. NCI Sponsored International Working Group. J Clin Oncol. 1999 Apr.; 17(4):1244]), positron-emission tomography scanning, white blood cell counts, differentials, Fluorescence Activated Cell Sorting, bone marrow aspiration, lymph node biopsies/histologies, and various lymphoma specific clinical chemistry parameters (e.g. lactate dehydrogenase) and other established standard methods may be used.

[0641] Another major challenge in the development of drugs such as the pharmaceutical composition of the invention is the predictable modulation of pharmacokinetic properties. To this end, a pharmacokinetic profile of the drug candidate, i.e. a profile of the pharmacokinetic parameters that affect the ability of a particular drug to treat a given condition, can be established. Pharmacokinetic parameters of the drug influencing the ability of a drug for treating a certain disease entity include, but are not limited to: half-life, volume of distribution, hepatic first-pass metabolism and the degree of blood serum binding. The efficacy of a given drug agent can be influenced by each of the parameters mentioned above.

[0642] “Half-life” means the time where 50% of an administered drug are eliminated through biological processes, e.g. metabolism, excretion, etc. By “hepatic first-pass metabolism” is meant the propensity of a drug to be metabolized upon first contact with the liver, i.e. during its first pass through the liver. “Volume of distribution” means the degree of retention of a drug throughout the various compartments of the body, like e.g. intracellular and extracellular spaces, tissues and organs, etc. and the distribution of the drug within these compartments. “Degree of blood serum binding” means the propensity of a drug to interact with and bind to blood serum proteins, such as albumin, leading to a reduction or loss of biological activity of the drug.

[0643] Pharmacokinetic parameters also include bioavailability, lag time (Tlag), Tmax, absorption rates, more onset and/or Cmax for a given amount of drug administered. “Bioavailability” means the amount of a drug in the blood compartment. “Lag time” means the time delay between the administration of the drug and its detection and measurability in blood or plasma. “Tmax” is the time after which maximal blood concentration of the drug is reached, and “Cmax” is the blood concentration maximally obtained with a given drug. The time to reach a blood or tissue concentration of the drug which is required for its biological effect is influenced by all parameters. Pharmacokinetic parameters of bispecific antibody constructs exhibiting cross-species specificity, which may be determined in preclinical animal testing in non-chimpanzee primates as outlined above, are also set forth e.g. in the publication by Schlereth et al. (Cancer Immunol. Immunother. 20 (2005), 1-12).

[0644] One embodiment provides the antibody construct of the invention or the antibody construct produced according to the process of the invention for use in the prevention, treatment or amelioration of a tumor or cancer disease or of a metastatic cancer disease. It is envisaged that this tumor or cancer or metastatic cancer is CD70 expressing.

[0645] The formulations described herein are useful as pharmaceutical compositions in the treatment, amelioration and/or prevention of the pathological medical condition as described herein in a patient in need thereof. The term “treatment” refers to both therapeutic treatment and prophylactic or preventative measures. Treatment includes the application or administration of the formulation to the body, an isolated tissue, or cell from a patient who has a disease/disorder, a symptom of a disease/disorder, or a predisposition toward a disease/disorder, with the purpose to cure, heal, alleviate, relieve, alter, remedy, ameliorate, improve, or affect the disease, the symptom of the disease, or the predisposition toward the disease.

[0646] The term “amelioration” as used herein refers to any improvement of the disease state of a patient having a tumor or cancer or a metastatic cancer as specified herein below, by the administration of an antibody construct according to the invention to a subject in need thereof. Such an improvement may also be seen as a slowing or stopping of the progression of the tumor or cancer or metastatic cancer of the patient. The term “prevention” as used herein means the avoidance of the occurrence or re-occurrence of a patient having a tumor or cancer or a metastatic cancer as specified herein below, by the administration of an antibody construct according to the invention to a subject in need thereof.

[0647] The term “disease” refers to any condition that would benefit from treatment with the antibody construct or the pharmaceutic composition described herein. This includes chronic and acute disorders or diseases including those pathological conditions that predispose the mammal to the disease in question.

[0648] A “neoplasm” is an abnormal growth of tissue, usually but not always forming a mass. When also forming a mass, it is commonly referred to as a “tumor”. Neoplasms or tumors or can be benign, potentially malignant (pre-cancerous), or malignant. Malignant neoplasms are commonly called cancer. They usually invade and destroy the surrounding tissue and may form metastases, i.e., they spread to other parts, tissues or organs of the body. Hence, the term “metatstatic cancer” encompasses metastases to other tissues or organs than the one of the original tumor. Lymphomas and leukemias are lymphoid neoplasms. For the purposes of the present invention, they are also encompassed by the terms “tumor” or “cancer”.

[0649] In a preferred embodiment of the invention, the tumor or cancer disease is selected from the group consisting of renal, lung, pancreatic, ovarian, breast, colon, head and neck, stomach, rectal, thymic, and brain tumor or cancer, leukemia, lymphoma, melanoma, Kaposi's Sarcoma, embryonal carcinoma, and a metastatic cancer disease derived from any of the foregoing.

[0650] More specifically, the tumor or cancer disease can be selected from the group consisting of renal cell carcinoma (RCC), clear cell RCC (ccRCC), papillary RCC, chromophobe RCC, sarcomatoid RCC, non-small cell lung cancer (NSCLC), lung squamous carcinoma, pancreatic adenocarcinoma such as pancreatic ductal adenocarcinoma, non-small cell lung cancer (NSCLC), lung squamous carcinoma, laryngeal carcinoma, pharyngeal carcinoma, nasopharangeal carcinoma, undifferentiated carcinoma of the rhino-pharynx, lymphoepithelioma, glioblastoma, glioma, meningioma, acute lymphocytic leukemia (ALL), chronic lymphocytic leukemia (CLL), T-cell leukemia, adult T-cell leukemia, B-cell lineage cancer, B-cell lymphoma, diffuse large B cell lymphoma (DLBCL), non-Hodgkin's lymphoma (NHL), Burkitt's lymphoma, anaplastic large-cell lymphomas (ALCL), multiple myeloma, cutaneous T-cell lymphomas, nodular small cleaved-cell lymphomas, lymphocytic lymphomas, peripheral T-cell lymphomas, Lennert's lymphomas, immunoblastic lymphoma, T-cell lymphoma, entroblastic/centrocytic (cb/cc) follicular lymphoma, angioimmunoblastic lymphadenopathy (AILD)-like T cell lymphoma, HIV associated body cavity based lymphoma, Castleman's disease, or Waldenstrom's macroglobulinemia. The metastatic cancer disease can be derived from any of the foregoing.

[0651] The invention also provides a method for the treatment or amelioration of tumor or cancer disease or a metastatic cancer disease, comprising the step of administering to a subject in need thereof the antibody construct of the invention or the antibody construct produced according to the process of the invention. It is envisaged that this tumor or cancer or metastatic cancer is CD70 expressing.

[0652] The terms “subject in need” or those “in need of treatment” includes those already with the disorder, as well as those in which the disorder is to be prevented. The subject in need or “patient” includes human and other mammalian subjects that receive either prophylactic or therapeutic treatment.

[0653] The antibody construct of the invention will generally be designed for specific routes and methods of administration, for specific dosages and frequencies of administration, for specific treatments of specific diseases, with ranges of bio-availability and persistence, among other things. The materials of the composition are preferably formulated in concentrations that are acceptable for the site of administration.

[0654] Formulations and compositions thus may be designed in accordance with the invention for delivery by any suitable route of administration. In the context of the present invention, the routes of administration include, but are not limited to
[0655] topical routes (such as epicutaneous, inhalational, nasal, opthalmic, auricular/aural, vaginal, mucosal);
[0656] enteral routes (such as oral, gastrointestinal, sublingual, sublabial, buccal, rectal); and
[0657] parenteral routes (such as intravenous, intraarterial, intraosseous, intramuscular, intracerebral, intracerebroventricular, epidural, intrathecal, subcutaneous, intraperitoneal, extra-amniotic, intraarticular, intracardiac, intradermal, intralesional, intrauterine, intravesical, intravitreal, transdermal, intranasal, transmucosal, intrasynovial, intraluminal).

[0658] The pharmaceutical compositions and the antibody construct of this invention are particularly useful for parenteral administration, e.g., subcutaneous or intravenous delivery, for example by injection such as bolus injection, or by infusion such as continuous infusion. Pharmaceutical compositions may be administered using a medical device. Examples of medical devices for administering pharmaceutical compositions are described in U.S. Pat. Nos. 4,475,196; 4,439,196; 4,447,224; 4,447, 233; 4,486,194; 4,487,603; 4,596,556; 4,790,824; 4,941,880; 5,064,413; 5,312,335; 5,312,335; 5,383,851; and 5,399,163.

[0659] In particular, the present invention provides for an uninterrupted administration of the suitable composition. As a non-limiting example, uninterrupted or substantially uninterrupted, i.e. continuous administration may be realized by a small pump system worn by the patient for metering the influx of therapeutic agent into the body of the patient. The pharmaceutical composition comprising the antibody construct of the invention can be administered by using said pump systems. Such pump systems are generally known in the art, and commonly rely on periodic exchange of cartridges containing the therapeutic agent to be infused. When exchanging the cartridge in such a pump system, a temporary interruption of the otherwise uninterrupted flow of therapeutic agent into the body of the patient may ensue. In such a case, the phase of administration prior to cartridge replacement and the phase of administration following cartridge replacement would still be considered within the meaning of the pharmaceutical means and methods of the invention together make up one “uninterrupted administration” of such therapeutic agent.

[0660] The continuous or uninterrupted administration of the antibody constructs of the invention may be intravenous or subcutaneous by way of a fluid delivery device or small pump system including a fluid driving mechanism for driving fluid out of a reservoir and an actuating mechanism for actuating the driving mechanism. Pump systems for subcutaneous administration may include a needle or a cannula for penetrating the skin of a patient and delivering the suitable composition into the patient's body. Said pump systems may be directly fixed or attached to the skin of the patient independently of a vein, artery or blood vessel, thereby allowing a direct contact between the pump system and the skin of the patient. The pump system can be attached to the skin of the patient for 24 hours up to several days. The pump system may be of small size with a reservoir for small volumes. As a non-limiting example, the volume of the reservoir for the suitable pharmaceutical composition to be administered can be between 0.1 and 50 ml.

[0661] The continuous administration may also be transdermal by way of a patch worn on the skin and replaced at intervals. One of skill in the art is aware of patch systems for drug delivery suitable for this purpose. It is of note that transdermal administration is especially amenable to uninterrupted administration, as exchange of a first exhausted patch can advantageously be accomplished simultaneously with the placement of a new, second patch, for example on the surface of the skin immediately adjacent to the first exhausted patch and immediately prior to removal of the first exhausted patch. Issues of flow interruption or power cell failure do not arise.

[0662] If the pharmaceutical composition has been lyophilized, the lyophilized material is first reconstituted in an appropriate liquid prior to administration. The lyophilized material may be reconstituted in, e.g., bacteriostatic water for injection (BWFI), physiological saline, phosphate buffered saline (PBS), or the same formulation the protein had been in prior to lyophilization.

[0663] The compositions of the present invention can be administered to the subject at a suitable dose which can be determined e.g. by dose escalating studies by administration of increasing doses of the antibody construct of the invention exhibiting cross-species specificity described herein to non-chimpanzee primates, for instance macaques. As set forth above, the antibody construct of the invention exhibiting cross-species specificity described herein can be advantageously used in identical form in preclinical testing in non-chimpanzee primates and as drug in humans. The dosage regimen will be determined by the attending physician and clinical factors. As is well known in the medical arts, dosages for any one patient depend upon many factors, including the patient's size, body surface area, age, the particular compound to be administered, sex, time and route of administration, general health, and other drugs being administered concurrently.

[0664] The term “effective dose” or “effective dosage” is defined as an amount sufficient to achieve or at least partially achieve the desired effect. The term “therapeutically effective dose” is defined as an amount sufficient to cure or at least partially arrest the disease and its complications in a patient already suffering from the disease. Amounts or doses effective for this use will depend on the condition to be treated (the indication), the delivered antibody construct, the therapeutic context and objectives, the severity of the disease, prior therapy, the patient's clinical history and response to the therapeutic agent, the route of administration, the size (body weight, body surface or organ size) and/or condition (the age and general health) of the patient, and the general state of the patient's own immune system. The proper dose can be adjusted according to the judgment of the attending physician such that it can be administered to the patient once or over a series of administrations, and in order to obtain the optimal therapeutic effect.

[0665] A typical dosage may range from about 0.1 μg/kg to up to about 30 mg/kg or more, depending on the factors mentioned above. In specific embodiments, the dosage may range from 1.0 μg/kg up to about 20 mg/kg, optionally from 10 μg/kg up to about 10 mg/kg or from 100 μg/kg up to about 5 mg/kg.

[0666] A therapeutic effective amount of an antibody construct of the invention preferably results in a decrease in severity of disease symptoms, an increase in frequency or duration of disease symptom-free periods or a prevention of impairment or disability due to the disease affliction. For treating CD70-expressing tumors, a therapeutically effective amount of the antibody construct of the invention, e.g. an anti-CD70/anti-CD3 antibody construct, preferably inhibits cell growth or tumor growth by at least about 20%, at least about 40%, at least about 50%, at least about 60%, at least about 70%, at least about 80%, or at least about 90% relative to untreated patients. The ability of a compound to inhibit tumor growth may be evaluated in an animal model predictive of efficacy in human tumors.

[0667] The pharmaceutical composition can be administered as a sole therapeutic or in combination with additional therapies such as anti-cancer therapies as needed, e.g. other proteinaceous and non-proteinaceous drugs. These drugs may be administered simultaneously with the composition comprising the antibody construct of the invention as defined herein or separately before or after administration of said antibody construct in timely defined intervals and doses.

[0668] The term “effective and non-toxic dose” as used herein refers to a tolerable dose of an inventive antibody construct which is high enough to cause depletion of pathologic cells, tumor elimination, tumor shrinkage or stabilization of disease without or essentially without major toxic effects. Such effective and non-toxic doses may be determined e.g. by dose escalation studies described in the art and should be below the dose inducing severe adverse side events (dose limiting toxicity, DLT).

[0669] The term “toxicity” as used herein refers to the toxic effects of a drug manifested in adverse events or severe adverse events. These side events might refer to a lack of tolerability of the drug in general and/or a lack of local tolerance after administration. Toxicity could also include teratogenic or carcinogenic effects caused by the drug.

[0670] The term “safety”, “in vivo safety” or “tolerability” as used herein defines the administration of a drug without inducing severe adverse events directly after administration (local tolerance) and during a longer period of application of the drug. “Safety”, “in vivo safety” or “tolerability” can be evaluated e.g. at regular intervals during the treatment and follow-up period. Measurements include clinical evaluation, e.g. organ manifestations, and screening of laboratory abnormalities. Clinical evaluation may be carried out and deviations to normal findings recorded/coded according to NCI-CTC and/or MedDRA standards. Organ manifestations may include criteria such as allergy/immunology, blood/bone marrow, cardiac arrhythmia, coagulation and the like, as set forth e.g. in the Common Terminology Criteria for adverse events v3.0 (CTCAE). Laboratory parameters which may be tested include for instance hematology, clinical chemistry, coagulation profile and urine analysis and examination of other body fluids such as serum, plasma, lymphoid or spinal fluid, liquor and the like. Safety can thus be assessed e.g. by physical examination, imaging techniques (i.e. ultrasound, x-ray, CT scans, Magnetic Resonance Imaging (MRI), other measures with technical devices (i.e. electrocardiogram), vital signs, by measuring laboratory parameters and recording adverse events. For example, adverse events in non-chimpanzee primates in the uses and methods according to the invention may be examined by histopathological and/or histochemical methods.

[0671] The above terms are also referred to e.g. in the Preclinical safety evaluation of biotechnology-derived pharmaceuticals S6; ICH Harmonised Tripartite Guideline; ICH Steering Committee meeting on Jul. 16, 1997.

[0672] In a further embodiment, the invention provides a kit comprising an antibody construct of the invention, an antibody construct produced according to the process of the invention, a polynucleotide/nucleic acid molecule of the invention, a vector of the invention, and/or a host cell of the invention.

[0673] In the context of the present invention, the term “kit” means two or more components—one of which corresponding to the antibody construct, the pharmaceutical composition, the vector or the host cell of the invention—packaged together in a container, recipient or otherwise. A kit can hence be described as a set of products and/or utensils that are sufficient to achieve a certain goal, which can be marketed as a single unit.

[0674] The kit may comprise one or more recipients (such as vials, ampoules, containers, syringes, bottles, bags) of any appropriate shape, size and material (preferably waterproof, e.g. plastic or glass) containing the antibody construct or the pharmaceutical composition of the present invention in an appropriate dosage for administration (see above). The kit may additionally contain directions for use (e.g. in the form of a leaflet or instruction manual), means for administering the antibody construct of the present invention such as a syringe, pump, infuser or the like, means for reconstituting the antibody construct of the invention and/or means for diluting the antibody construct of the invention.

[0675] The invention also provides kits for a single-dose administration unit. The kit of the invention may also contain a first recipient comprising a dried/lyophilized antibody construct and a second recipient comprising an aqueous formulation. In certain embodiments of this invention, kits containing single-chambered and multi-chambered pre-filled syringes (e.g., liquid syringes and lyosyringes) are provided.

[0676] The Figures Show:

[0677] FIG. 1:

[0678] Expression control of the constructs used for epitope mapping on CHO cells, using an anti-V5 antibody. See Example 1.

[0679] FIG. 2:

[0680] Schematic representation of a multiplex epitope binning or competition assay and FACS read-out. 14 beads are pre-coated, each with a different antibody. The second antibody “X” is added, and additional binding is determined. If no additional binding can be determined, the antibodies compete for binding with one another.

[0681] FIG. 3:

[0682] Experimental set-up of the epitope mapping analysis, see Example 2. A V5 tag was fused via a glycine/serine linker to the C-terminus of the chimeric molecules, as indicated.

[0683] FIGS. 4A and 4B:

[0684] Epitope mapping result of several exemplary CD70×CD3 bispecific binders in an scFc format, carried out as described in Example 2. Although not specifically indicated in FIGS. 4A and 4B, all constructs were CD70×CD3 (I2C) bispecific and in scFc format. The x-axis depicts Comp. PE-A (PE=phycoerythrin; A=signal area), and the y-axis depicts counts (events) normalized to mode.

[0685] FIGS. 5A-5C:

[0686] Bispecific binding, interspecies cross-reactivity and absence of binding to human CD70 paralogue CD40L, shown for a representative number of antibody constructs in an scFc format, as analyzed in Examples 5 and 6. The x-axis depicts Comp. PE-A (PE=phycoerythrin; A=signal area), and the y-axis depicts counts (events).

[0687] FIG. 6:

[0688] Cytotoxic activity of CD70-21D_CCxI2C-scFc as analyzed in a FACS-based cytotoxicity assay using CHO cells transfected with human CD70 as target cells, and unstimulated human PBMC as effector cells. The assay was carried out as described in Example 8.5. In a parallel approach, soluble CD27 was added in a concentration of 1 ng/ml. The presence of the soluble form of CD27 did not impair the cytotoxic activity of the tested antibody construct.

### EXAMPLES

[0689] The following examples illustrate the invention. These examples should not be construed as to limit the scope of this invention. The present invention is limited only by the claims.

### Example 1

[0690] Generation of CHO Cells Expressing Wild Type and Truncated CD70

[0691] The extracellular domain of the CD70 antigen can be subdivided into different sub-domains or regions E1 to E7 that are defined, for the purposes of Examples 1 and 2, by the following amino acid positions:

| | | |
|---|---|---|
| E1 | aa 43-62 | SEQ ID NO: 743 |
| E2 | aa 63-84 | SEQ ID NO: 744 |
| E3 | aa 85-109 | SEQ ID NO: 745 |
| E4 | aa 110-134 | SEQ ID NO: 746 |
| E5 | aa 135-151 | SEQ ID NO: 747 |
| E6 | aa 152-175 | SEQ ID NO: 748 |
| E7 | aa 176-193 | SEQ ID NO: 749 |
| E1 + 2 | aa 43-84 | SEQ ID NO: 750 |
| E3 + 4 | aa 85-134 | SEQ ID NO: 751 |
| E4 + 5 | aa 110-151 | SEQ ID NO: 752 |
| E5 + 6 | aa 135-175 | SEQ ID NO: 753 |
| E6 + 7 | aa 152-193 | SEQ ID NO: 754 |

[0692] For the construction of the human/mouse chimeric CD70 molecules used for epitope mapping (Example 2), the sequences of the respective seven human regions as well as the five combinations of two neighboring human regions (see above) were replaced with the corresponding regions from murine CD70. Furthermore, a V5 tag (GKPIPNPLLGLDST) was fused via a “GGGGS” linker to the C-terminus of the chimeric molecules. The final chimeric molecule sequences are depicted in SEQ ID NOs: 759-768. In addition, full length human CD70 (SEQ ID NO: 741) and full-length mouse CD70 (SEQ ID NO: 757) were constructed, both having a V5 tag (GKPIPNPLLGLDST) fused via a “GGGGS” linker to their C-terminus.

[0693] For the generation of CHO dhfr− cells expressing the above constructs, the respective coding sequences were cloned into a plasmid designated pEF-DHFR (pEF-DHFR is described in Raum et al. Cancer Immunol Immunother 50 (2001) 141-150). CHO cells transfected with human CD70, but without the V5 tag, were also generated. All cloning procedures were carried out according to standard protocols (Sambrook, Molecular Cloning; A Laboratory Manual, 3rd edition, Cold Spring Harbour Laboratory Press, Cold Spring Harbour, New York (2001)). For each construct, a corresponding plasmid was transfected into DHFR deficient CHO cells for eukaryotic expression, as described by Kaufman R. J. (1990) Methods Enzymol. 185, 537-566.

[0694] The expression of the constructs on the CHO cells was verified using a monoclonal mouse IgG2a anti-v5 tag antibody (1 μg/ml; AbD Serotec, # MCA 1360). Bound monoclonal antibody was detected with an anti-mouse IgG Fc-gamma-PE. As negative control, cells were incubated with isotype control antibody instead of the first antibody. The samples were measured by flow cytometry. CHO transfectants did not express E5 alone or E5+6. See FIG. 1.

### Example 2

[0695] Epitope Mapping of Anti-CD70 Antibody Constructs

[0696] The CHO cells generated as described in Example 1 were stained with crude, undiluted periplasmic extract containing individual anti-CD70 scFv molecules. Bound scFv were detected with mouse monoclonal anti-FLAG M2 antibody (1 μg/ml; Sigma F1804) followed by an anti-mouse IgG Fc-gamma-PE (1:100; Jackson Immunoresearch #115-116-071). All antibodies were diluted in PBS/1.5% FCS. As negative control, cells were incubated with PBS/2% FCS instead of the periplasmic extract. The samples were measured by flow cytometry. While all tested anti-CD70 scFv molecules were able to bind to human CD70 w/o the V5 tag (strong FACS signal), none of them was able to bind to murine CD70 (no FACS signal).

[0697] The binders were classified into different groups (I, II, III, IIIv, V, VI, VII and VIII), depending on the chimeric CD70 molecule for which a loss of binding was observed. The loss of binding is in most of the cases complete, but can in some cases also be partial. A merely partial loss of binding was observed in particular for the region denominated E6 (see Groups II, IIIv, VI and VIII), but in some cases also for other regions. For some binders tested, the results obtained with the combination of two neighboring regions (E1+2, E3+4, E4+5, E6+7) were not always explicit. Therefore, the classification into the different groups was mainly driven by the results obtained with those chimeric molecules having only one region replaced with the murine counterpart region. Results are shown in Table 4.

TABLE 4
Several regions of the extracellular CD70 domain (E2, E3, E4, E6 and
combinations thereof) were identified as comprising an epitope recognized by the respective
anti-CD70 binding molecules, as detected by a complete or partial loss of the FACS signal.

| | | CD70 binder | |
|---|---|---|---|
| | Loss of signal in these | specific for | |
| Group* | chimeric molecules: | region: | Denomination of binder: CD70-x* |
| I | E2, E3, E4, E6 | E2/E3/E4/E6 | x = 4, 7, 9, 13, 35, 44, 45, 47, 48, 49, |
| | E1 + 2, E3 + 4, E4 + 5, E6 + 7 | | 50, 52, 57, 61, 62, 65, 67, 68, 73 |
| II | E2, E3, E4, (E6 partial) | E2/E3/E4/(E6) | x = 2, 8, 14, 15, 16, 17, 18, 20, 26, |
| | E1 + 2, E3 + 4, E4 + 5 | | 28, 29, 30, 31, 32, 33, 34, 36, 37, 38, |
| | | | 40, 41, 42, 43, 46, 53, 58, 59, 63, 66, |
| | | | 74 |
| III | E2, E3, E6 | E2/E3/E6 | x = 1, 11 |
| | E1 + 2, E6 + 7 | | |
| IIIv | E2, E3, (E6 partial) | E2/E3/(E6) | x = 3 |
| V | E3, E4, E6 | E3/E4/E6 | x = 12 |
| | E3 + 4, E4 + 5, E6 + 7 | | |
| VI | E3, E4, (E6 partial) | E3/E4/(E6) | x = 19, 21, 22, 23, 24, 25, 27, 39, 51, |
| | E3 + 4, E4 + 5 | | 54, 64, 69 |
| VII | huCD70-V5 and all | V5 tag inhibits | x = 55, 56, 60, 70, 71, 72 |
| | chimeric constructs | binding | |
| VIII | E3, (E6 partial) | E3/(E6) | x = 5, 6, 10 |

*The denomination of the groups and of the binders is also used in the sequence listing.

[0698] None of the anti-CD70 scFv molecules showed a loss of binding for the “E1” or for the “E7” chimeric molecule. Hence, the first binding domain of the antibody constructs of the invention seems to not bind to an epitope comprised within the region denominated E1, and it seems to not bind to an epitope comprised within the region denominated E7. In Group VII, it appears that the presence of the V5 tag in the chimeric molecules interferes with the binding of the anti-CD70 scFv molecules. Therefore, the epitope could not be determined. It can be speculated that this group of anti-CD70 scFv molecules binds to an epitope comprised within the region denominated E7, as this region is neighboring to the V5 tag.

[0699] FIG. 3 shows the experimental set-up, and FIGS. 4A and 4B show the epitope mapping result of several exemplary bispecific binders in an scFc format.

### Example 3

[0700] Biacore- and Octet Based Determination of Antibody Affinity to Human and Cynomolgus CD70 and CD3

[0701] Biacore analysis experiments were performed using recombinant human/cyno CD70-ECD fusion proteins with albumin to determine target binding of the antibody constructs of the invention.

[0702] In detail, CM5 Sensor Chips (GE Healthcare) were immobilized with approximately 600-800 RU of the respective recombinant antigen using acetate buffer pH 4.5 according to the manufacturer's manual. The CD70×CD3 bispecific antibody construct samples were loaded in a dilution series of the following concentrations: 50 nM, 25 nM, 12.5 nM, 6.25 nM and 3.13 nM diluted in HBS-EP running buffer (GE Healthcare). Flow rate was 30 μl/min for 3 min, then HBS-EP running buffer was applied for 8 min to 20 min again at a flow rate of 30 μl/ml. Regeneration of the chip was performed using 10 mM glycine 10 mM NaCl pH 1.5 solution. Data sets were analyzed using BiaEval Software. In general two independent experiments were performed.

[0703] Furthermore, Octet analysis experiments were performed using recombinant human/cyno CD70-NHS-PEG Biotin to determine target binding of the antibody constructs of the invention. In detail, Streptavidin-Tips were immobilized with approximately 0.1-0.2 nm of the respective recombinant antigen according to the manufacturer's manual. The CD70×CD3 bispecific antibody construct samples were prepared in a dilution series of the following concentrations: 300 nM, 150 nm, 75 nM, 37.5 nM, 18.8 nM, an 9.4 nM diluted in HBS-EP running buffer (GE Healthcare). For every dilution, one Streptavidin-Tip was immobilized with the antigen. The association was measured in a black 96 well MTP, Flow rate was 1000 rpm for 8 min association. For dissociation the tips were incubated in HBS-EP running buffer for 15 min to 30 min again at a flow rate of 1000 rpm. Data sets were analyzed using ForteBio Data Analysis Software. In general two independent experiments were performed.

[0704] The analyzed CD70×CD3 bispecific antibody constructs in an scFc format showed very high affinities to human CD70 in the 1-digit nanomolar range (except for one construct in the very low 2-digit nanomolar range), as determined by Octet analysis. Binding to macaque CD70 was balanced, also showing affinities in the 1-digit nanomolar range. The affinity values as well as the calculated affinity gap are shown in Table 5.

TABLE 5
Affinities of CD70xCD3 (I2C) bispecific antibody constructs
to human and macaque CD70 as determined by Octet analysis,
as well as the calculated interspecies affinity gaps. All
constructs were measured in two independent experiments each
using a dilution series, except for those marked with an
(*) which were measured in one experiment only.

| | | | Affinity |
|---|---|---|---|
| | Octet | Octet | gap |
| | based | based | KD |
| CD70xCD3 bispecific | affinity hu | affinity mac | mac/ |
| antibody construct | CD70 [nM] | CD70 [nM] | KD hu |
| CD70-13D_CCxI2C-scFc | 5.84 ± 1.07 | 5.41 ± 2.33 | 0.93 |
| CD70-16D_CCxI2C-scFc | 2.80 ± 1.30 | 0.60* | 0.21 |
| CD70-21D_CCxI2C-scFc | 0.81 ± 0.42 | 0.34* | 0.42 |
| CD70-24D_CCxI2C-scFc | 12.75 ± 0.35 | 8.75 ± 4.74 | 0.69 |
| CD70-25D_CCxI2C-scFc | 1.51 ± 0.43 | 1.57 ± 0.82 | 1.04 |
| CD70_1-G2D_CCxI2C-scFc | 2.35 ± 0.42 | 1.44 ± 0.32 | 0.61 |
| CD70-27D_CCxI2C-scFc | 5.84 ± 1.18 | 5.31 ± 0.22 | 0.91 |
| CD70-28D_CCxI2C-scFc | 5.50 ± 0.59 | 7.87 ± 0.78 | 1.43 |
| CD70-31D_CCxI2C-scFc | 5.44 ± 2.52 | 7.45 ± 1.03 | 1.37 |
| CD70-32D_CCxI2C-scFc | 4.07 ± 0.28 | 4.96 ± 0.57 | 1.22 |
| CD70-42D_CCxI2C-scFc | 2.56 ± 0.13 | 4.46 ± 0.35 | 1.74 |
| CD70-43D_CCxI2C-scFc | 6.92 ± 1.27 | 5.82 ± 2.26 | 0.84 |
| CD70-48D_CCxI2C-scFc | 2.12 ± 0.02 | 3.38 ± 0.10 | 1.59 |
| CD70-62D_CCxI2C-scFc | 3.05 ± 0.04 | 3.35 ± 0.43 | 1.10 |
| CD70-23D_CCxI2C-scFc | 2.58 ± 0.23 | 2.57 ± 0.12 | 1.00 |

[0705] Furthermore, the binding of the bispecific antibody constructs to human CD3 and macaque CD3 as well as to human and cyno FcRn was confirmed in a Biacore assay and was shown to be strong and well balanced. The analyzed CD70×CD3 bispecific antibody constructs in an scFc format showed high affinities to human CD3 in the very low 2-digit or in the 1-digit nanomolar range. Binding to macaque CD3 was balanced, also showing affinities in similar ranges. The affinity values as well as the calculated affinity gap are shown in Table 6.

TABLE 6
Affinities of CD70xCD3 (I2C) bispecific antibody constructs
to human and macaque CD3 as determined by Biacore analysis,
as well as the calculated interspecies affinity gaps.

| | | | Affinity |
|---|---|---|---|
| | Biacore | Biacore | gap |
| | based | based | KD |
| CD70xCD3 bispecific | affinity hu | affinity cyno | mac/ |
| antibody construct | CD3 [nM] | CD3 [nM] | KD hu |
| CD70-13D_CCxI2C-scFc | 13.35 ± 0.78 | 11.05 ± 0.64 | 0.83 |
| CD70-16D_CCxI2C-scFc | 14.05 ± 0.64 | 12.50 ± 1.84 | 0.89 |
| CD70-21D_CCxI2C-scFc | 12.60 ± 0.28 | 10.65 ± 0.35 | 0.85 |
| CD70-24D_CCxI2C-scFc | 13.15 ± 1.48 | 10.70 ± 1.41 | 0.81 |
| CD70-25D_CCxI2C-scFc | 12.75 ± 2.05 | 10.39 ± 2.14 | 0.81 |
| CD70_1-G2D_CCxI2C-scFc | 12.95 ± 0.35 | 10.75 ± 0.21 | 0.83 |
| CD70-27D_CCxI2C-scFc | 12.20 ± 2.26 | 10.05 ± 2.19 | 0.82 |
| CD70-28D_CCxI2C-scFc | 10.13 ± 1.66 | 8.56 ± 1.48 | 0.85 |
| CD70-31D_CCxI2C-scFc | 14.60 ± 1.13 | 12.22 ± 0.99 | 0.84 |
| CD70-32D_CCxI2C-scFc | 13.55 ± 1.91 | 11.40 ± 1.70 | 0.84 |
| CD70-42D_CCxI2C-scFc | 8.13 ± 0.21 | 7.96 ± 1.50 | 0.98 |
| CD70-43D_CCxI2C-scFc | 8.21 ± 0.76 | 6.81 ± 0.74 | 0.83 |
| CD70-48D_CCxI2C-scFc | 10.64 ± 1.22 | 9.09 ± 0.83 | 0.85 |
| CD70-62D_CCxI2C-scFc | 9.02 ± 1.20 | 7.67 ± 1.17 | 0.85 |
| CD70-23D_CCxI2C-scFc | 11.70 ± 1.13 | 9.65 ± 1.06 | 0.82 |

### Example 4

[0706] Scatchard-Based Analysis of CD70×CD3 Bispecific Antibody Construct Affinity to Human and Macaque CD70 on Target Antigen Positive Cells and Determination of the Interspecies Affinity Gap

[0707] The affinities of CD70×CD3 bispecific antibody constructs to CHO cells transfected with human or macaque CD70 were also determined by Scatchard analysis as the most reliable method for measuring potential affinity gaps between human and macaque CD70. For the Scatchard analysis, saturation binding experiments are performed using a monovalent detection system to precisely determine monovalent binding of the CD70×CD3 bispecific antibody constructs to the respective cell line.

[0708] 2×10⁴ cells of the respective cell line (recombinantly human CD70⁻ expressing CHO cell line, recombinantly macaque CD70⁻ expressing CHO cell line) were incubated each with 50 μl of a triplet dilution series (twelve dilutions at 1:2) of the respective CD70×CD3 bispecific antibody construct (until saturation is reached) starting at 10-20 nM followed by 16 h incubation at 4° C. under agitation and one residual washing step. Then, the cells were incubated for another hour with 30 μl of a CD3×ALEXA488 conjugate solution. After one washing step, the cells were resuspended in 150 μl FACS buffer containing 3.5% formaldehyde, incubated for further 15 min, centrifuged, resuspended in FACS buffer and analyzed using a FACS Cantoll machine and FACS Diva software. Data were generated from two independent sets of experiments, each using triplicates. Respective Scatchard analysis was calculated to extrapolate maximal binding (Bmax). The concentrations of CD70×CD3 bispecific antibody constructs at half-maximal binding were determined reflecting the respective KDs. Values of triplicate measurements were plotted as hyperbolic curves and as S-shaped curves to demonstrate proper concentration ranges from minimal to optimal binding.

[0709] The results are shown in Table 7 for a representative number of antibody constructs in an scFc format. Cell based Scatchard analysis confirmed that the CD70×CD3 bispecific antibody constructs of the invention are in the low nanomolar range in affinity to human CD70 and to mac CD70 and present with a small and very favorable cyno/human interspecies affinity gap of around 1.

TABLE 7
Affinities (KD) of CD70xCD3 bispecific antibody constructs
as determined in cell based Scatchard analysis with
the calculated affinity gap KD macaque CD70/KD human
CD70. Antibody constructs were measured in two independent
experiments, each using triplicates.

| | | | Affinity |
|---|---|---|---|
| | Cell | Cell | gap |
| | based | based | KD |
| CD70xCD3 bispecific | affinity hu | affinity mac | mac/ |
| antibody construct | CD70 [nM] | CD70 [nM] | KD hu |
| CD70-13D_CCxI2C-scFc | 7.64 ± 1.20 | 7.22 ± 1.60 | 0.95 |
| CD70-16D_CCxI2C-scFc | 6.93 ± 1.61 | 7.71 ± 1.74 | 1.11 |
| CD70-21D_CCxI2C-scFc | 10.77 ± 0.98 | 11.63 ± 1.22 | 1.08 |
| CD70-24D_CCxI2C-scFc | 8.30 ± 2.75 | 11.76 ± 2.55 | 1.42 |
| CD70-25D_CCxI2C-scFc | 11.08 ± 4.74 | 12.57 ± 2.02 | 1.13 |
| CD70_1-G2D_CCxI2C-scFc | 10.56 ± 1.25 | 9.80 ± 0.73 | 0.93 |
| CD70-27D_CCxI2C-scFc | 9.19 ± 0.54 | 10.53 ± 0.98 | 1.15 |
| CD70-28D_CCxI2C-scFc | 8.04 ± 1.73 | 7.18 ± 0.45 | 0.89 |
| CD70-31D_CCxI2C-scFc | 9.40 ± 0.78 | 10.54 ± 1.51 | 1.12 |
| CD70-32D_CCxI2C-scFc | 9.26 ± 4.36 | 7.56 ± 0.78 | 0.82 |
| CD70-42D_CCxI2C-scFc | 9.08 ± 2.21 | 9.15 ± 0.16 | 1.01 |
| CD70-43D_CCxI2C-scFc | 8.73 ± 3.56 | 9.14 ± 5.73 | 1.05 |
| CD70-48D_CCxI2C-scFc | 6.64 ± 0.13 | 6.56 ± 0.50 | 0.99 |
| CD70-62D_CCxI2C-scFc | 4.02 ± 0.12 | 5.17 ± 1.61 | 1.29 |
| CD70-23D_CCxI2C-scFc | 4.72 ± 0.11 | 6.58 ± 0.85 | 1.39 |

### Example 5

[0710] Bispecific Binding and Interspecies Cross-Reactivity

[0711] For confirmation of binding to human CD70 and CD3 and to cyno CD70 and CD3, bispecific antibody constructs of the invention were tested by flow cytometry using
[0712] CHO cells transfected with human CD70 and with macaque CD70, respectively,
[0713] the CD70 positive human ovarian carcinoma cell line OVCAR 8 (but other CD70 positive human cell lines such as the renal clear cell adenocarcinoma cell line O-786 are also conceivable)
[0714] CD3-expressing human T cell leukemia cell line HPB-all (DSMZ, Braunschweig, ACC483), and
[0715] the cynomolgus CD3-expressing T cell line LnPx 4119

[0716] For flow cytometry 200,000 cells of the respective cell lines were incubated for 60 min at 4° C. with 50 μl of purified bispecific antibody construct at a concentration of 5 μg/ml. The cells were washed twice in PBS/2% FCS and then incubated with an in-house mouse antibody (2 μg/ml) specific for the CD3 binding part of the bispecific antibody constructs for 30 min at 4° C. After washing, bound mouse antibodies were detected with a goat anti-mouse Fcγ-PE (1:100) for 30 min at 4° C. Samples were measured by flow cytometry. Non-transfected CHO cells were used as negative control.

[0717] The results are shown in FIG. 5A-5C for a representative number of antibody constructs in an scFc format. All tested CD70×CD3 constructs stained CHO cells transfected with human CD70 and with cyno CD70, and they also stained the CD70 positive renal clear cell adenocarcinoma cell line O-786 (natural expresser). Human and cyno T cell lines expressing CD3 were also recognized by the bispecific antibody constructs. Moreover, there was no staining of the negative control cells (CHO cells transfected with human CD40L and non-transfected CHO cells).

### Example 6

[0718] Confirmation of the Absence of Binding to Human Paralogues

[0719] Human CD70 paralogue CD40L was stably transfected into CHO cells. The sequence of the paralogue as used in the present example is identified in the sequence listing (SEQ ID NO: 769). Protein expression was confirmed in FACS analyses with specific antibodies. The flow cytometry assay was carried out as described in Example 5. The results are shown in FIGS. 5A-5C and also referred to in Example 5. The analysis confirmed that none of the CD70×CD3 bispecific antibody constructs of the invention cross-reacts with the human CD70 paralogue CD40L.

### Example 7

[0720] Identity to Human Germline

[0721] In order to analyze the identity/similarity of the sequence of the antibody constructs to the human antibody germline genes, the CD70 binding domains of the invention were aligned as follows: Full VL including all CDRs was aligned; full VH including CDRs 1 and 2 but except CDR3 was aligned against human antibody germline genes (Vbase). More details can be found in the specification of this application. The results are shown in Table 8 below. All variants show high germline similarity.

TABLE 8
Percentage of identity of VH and VL to human germline

| CD70xCD3 bispecific | % identity to human | % identity to human |
|---|---|---|
| antibody construct | germline [VH] | germline [VL] |
| CD70-13D_CCxI2C-scFc | 92.86 | 95.51 |
| CD70-16D_CCxI2C-scFc | 93.88 | 97.75 |
| CD70-21D_CCxI2C-scFc | 92.86 | 96.63 |
| CD70-24D_CCxI2C-scFc | 94.90 | 98.88 |
| CD70-25D_CCxI2C-scFc | 93.88 | 97.75 |
| CD70_1-G2D_CCxI2C-scFc | 93.88 | 96.63 |
| CD70-27D_CCxI2C-scFc | 94.90 | 96.63 |
| CD70-28D_CCxI2C-scFc | 94.90 | 95.51 |
| CD70-31D_CCxI2C-scFc | 91.84 | 94.38 |
| CD70-32D_CCxI2C-scFc | 92.86 | 95.51 |
| CD70-42D_CCxI2C-scFc | 94.90 | 96.63 |
| CD70-43D_CCxI2C-scFc | 92.86 | 96.63 |
| CD70-48D_CCxI2C-scFc | 90.82 | 95.45 |
| CD70-62D_CCxI2C-scFc | 92.86 | 97.73 |

### Example 8

[0722] Cytotoxic Activity

[0723] The potency of CD70×CD3 bispecific antibody constructs of the invention in redirecting effector T cells against CD70-expressing target cells was analyzed in five in vitro cytotoxicity assays:
[0724] The potency of CD70×CD3 bispecific antibody constructs in redirecting stimulated human CD8+ effector T cells against human CD70-transfected CHO cells was measured in an 18 hour 51-chromium release assay.
[0725] The potency of CD70×CD3 bispecific antibody constructs in redirecting stimulated human CD8+ effector T cells against the CD70 positive human ovarian carcinoma cell line OVCAR 8 (but other CD70 positive human cell lines are also conceivable) was measured in an 18 hour 51-chromium release assay.
[0726] The potency of CD70×CD3 bispecific antibody constructs in redirecting the T cells in unstimulated human PBMC against human CD70-transfected CHO cells was measured in a 48 hour FACS-based cytotoxicity assay.
[0727] The potency of CD70×CD3 bispecific antibody constructs in redirecting the T cells in unstimulated human PBMC against the CD70 positive human ovarian carcinoma cell line OVCAR 8 (but other CD70 positive human cell lines are also conceivable) was measured in a 48 hour FACS-based cytotoxicity assay.
[0728] For confirmation that the cross-reactive CD70×CD3 bispecific antibody constructs are capable of redirecting macaque T cells against macaque CD70-transfected CHO cells, a 48 hour FACS-based cytotoxicity assay was performed with a macaque T cell line as effector T cells.

### Example 8.1

[0729] Chromium Release Assay with Stimulated Human T Cells

[0730] Stimulated T cells enriched for CD8+ T cells were obtained as described in the following. A petri dish (145 mm diameter, Greiner bio-one GmbH, Kremsmünster) was coated with a commercially available anti-CD3 specific antibody (OKT3, Orthoclone) in a final concentration of 1 μg/ml for 1 hour at 37° C. Unbound protein was removed by one washing step with PBS. 3-5×107 human PBMC were added to the precoated petri dish in 120 ml of RPMI 1640 with stabilized glutamine/10% FCS/IL-2 20 U/ml (Proleukin®, Chiron) and stimulated for 2 days. On the third day, the cells were collected and washed once with RPMI 1640. IL-2 was added to a final concentration of 20 U/ml and the cells were cultured again for one day in the same cell culture medium as above. CD8+ cytotoxic T lymphocytes (CTLs) were enriched by depletion of CD4+ T cells and CD56+ NK cells using Dynal-Beads according to the manufacturer's protocol.

[0731] Cyno CD70- or human CD70-transfected CHO target cells were washed twice with PBS and labeled with 11.1 MBq 51Cr in a final volume of 100 μl RPMI with 50% FCS for 60 minutes at 37° C. Subsequently, the labeled target cells were washed 3 times with 5 ml RPMI and then used in the cytotoxicity assay. The assay was performed in a 96-well plate in a total volume of 200 μl supplemented RPMI with an E:T ratio of 10:1. A starting concentration of 0.01-1 μg/ml of purified bispecific antibody construct and threefold dilutions thereof were used. Incubation time for the assay was 18 hours. Cytotoxicity was determined as relative values of released chromium in the supernatant relative to the difference of maximum lysis (addition of Triton-X) and spontaneous lysis (without effector cells). All measurements were carried out in quadruplicates. Measurement of chromium activity in the supernatants was performed in a Wizard 3″ gamma counter (Perkin Elmer Life Sciences GmbH, Köln, Germany). Analysis of the results was carried out with Prism 5 for Windows (version 5.0, GraphPad Software Inc., San Diego, Calif., USA). EC50 values calculated by the analysis program from the sigmoidal dose response curves were used for comparison of cytotoxic activity.

### Example 8.2

[0732] Potency of Redirecting Stimulated Human Effector T Cells Against Human CD70-Transfected CHO Cells

[0733] The cytotoxic activity of CD70×CD3 bispecific antibody constructs according to the invention was analyzed in a 51-chromium (51Cr) release cytotoxicity assay using CHO cells transfected with human CD70 as target cells, and stimulated human CD8+ T cells as effector cells. The experiment was carried out as described in Example 8.1.

[0734] The results are shown in Table 9 for a representative number of antibody constructs in an scFc format. The CD70×CD3 (I2C) bispecific antibody constructs showed very potent cytotoxic activity against human CD70 transfected CHO cells in the sub-picomolar range.

TABLE 9
EC50 values [pM] of CD70xCD3 bispecific antibody constructs
analyzed in a 51-chromium (51Cr) release cytotoxicity assay
using CHO cells transfected with human CD70 as target cells,
and stimulated human CD8 T cells as effector cells.

| CD70xCD3 bispecific | |
|---|---|
| antibody construct | EC50 [pM] |
| CD70-13D_CCxI2C-scFc | 0.07 |
| CD70-16D_CCxI2C-scFc | 0.005 |
| CD70-21D_CCxI2C-scFc | 0.06 |
| CD70-24D_CCxI2C-scFc | 0.15 |
| CD70-25D_CCxI2C-scFc | 0.01 |
| CD70_1-G2D_CCxI2C-scFc | 0.01 |
| CD70-27D_CCxI2C-scFc | 0.08 |
| CD70-28D_CCxI2C-scFc | 0.03 |
| CD70-31D_CCxI2C-scFc | 0.11 |
| CD70-32D_CCxI2C-scFc | 0.08 |
| CD70-42D_CCxI2C-scFc | 0.05 |
| CD70-43D_CCxI2C-scFc | 0.08 |
| CD70-48D_CCxI2C-scFc | 0.01 |
| CD70-62D_CCxI2C-scFc | 0.02 |
| CD70-13D_CCxI2C-scFc | 0.05 |

### Example 8.3

[0735] Potency of Redirecting Stimulated Human Effector T Cells Against a CD70 Positive Human Cell Line

[0736] The cytotoxic activity of CD70×CD3 bispecific antibody constructs was analyzed in a 51-chromium (51Cr) release cytotoxicity assay using the CD70 positive human ovarian carcinoma cell line OVCAR 8 as source of target cells, and stimulated human CD8+ T cells as effector cells. The assay was carried out as described in Example 8.1.

[0737] The results are shown in Table 10 for a representative number of antibody constructs in an scFc format. In accordance with the results of the 51-chromium release assays with stimulated enriched human CD8+ T lymphocytes as effector cells and human CD70-transfected CHO cells as target cells, the CD70×CD3 bispecific antibody constructs of the present invention are also very potent in cytotoxic activity against natural expresser target cells with a cytotoxic activity against natural expresser cells in the sub-picomolar range.

TABLE 10
EC50 values [pM] of CD70xCD3 (I2C) bispecific antibody
constructs analyzed in an 18-hour 51-chromium (51Cr) release
cytotoxicity assay with the CD70-positive human ovarian carcinoma
cell line OVCAR 8 as source of target cells, and stimulated
enriched human CD8 T cells as effector cells.

| CD70xCD3 bispecific | |
|---|---|
| antibody construct | EC50 [pM] |
| CD70-13D_CCxI2C-scFc | 0.14 |
| CD70-16D_CCxI2C-scFc | 0.06 |
| CD70-21D_CCxI2C-scFc | 0.10 |
| CD70-24D_CCxI2C-scFc | 1.39 |
| CD70-25D_CCxI2C-scFc | 0.24 |
| CD70_1-G2D_CCxI2C-scFc | 0.12 |
| CD70-27D_CCxI2C-scFc | 1.35 |
| CD70-28D_CCxI2C-scFc | 0.49 |
| CD70-31D_CCxI2C-scFc | 0.64 |
| CD70-32D_CCxI2C-scFc | 0.46 |
| CD70-42D_CCxI2C-scFc | 0.84 |
| CD70-43D_CCxI2C-scFc | 0.67 |
| CD70-48D_CCxI2C-scFc | 0.47 |
| CD70-62D_CCxI2C-scFc | 0.47 |
| CD70-13D_CCxI2C-scFc | 0.36 |

### Example 8.4

[0738] FACS-Based Cytotoxicity Assay with Unstimulated Human PBMC

[0739] Isolation of Effector Cells

[0740] Human peripheral blood mononuclear cells (PBMC) were prepared by Ficoll density gradient centrifugation from enriched lymphocyte preparations (buffy coats), a side product of blood banks collecting blood for transfusions. Buffy coats were supplied by a local blood bank and PBMC were prepared on the same day of blood collection. After Ficoll density centrifugation and extensive washes with Dulbecco's PBS (Gibco), remaining erythrocytes were removed from PBMC via incubation with erythrocyte lysis buffer (155 mM NH4Cl, 10 mM KHCO3, 100 μM EDTA). Platelets were removed via the supernatant upon centrifugation of PBMC at 100×g. Remaining lymphocytes mainly encompass B and T lymphocytes, NK cells and monocytes. PBMC were kept in culture at 37° C./5% CO2 in RPMI medium (Gibco) with 10% FCS (Gibco).

[0741] Depletion of CD14+ and CD56+ Cells

[0742] For depletion of CD14+ cells, human CD14 MicroBeads (Milteny Biotec, MACS, #130-050-201) were used, for depletion of NK cells human CD56 MicroBeads (MACS, #130-050-401). PBMC were counted and centrifuged for 10 min at room temperature with 300×g. The supernatant was discarded and the cell pellet resuspended in MACS isolation buffer [80 μL/107 cells; PBS (Invitrogen, #20012-043), 0.5% (v/v) FBS (Gibco, #10270-106), 2 mM EDTA (Sigma-Aldrich, #E-6511)]. CD14 MicroBeads and CD56 MicroBeads (20 μL/107 cells) were added and incubated for 15 min at 4-8° C. The cells were washed with MACS isolation buffer (1-2 mL/107 cells). After centrifugation (see above), supernatant was discarded and cells resuspended in MACS isolation buffer (500 μL/108 cells). CD14/CD56 negative cells were then isolated using LS Columns (Miltenyi Biotec, #130-042-401). PBMC w/o CD14+/CD56+ cells were cultured in RPMI complete medium i.e. RPMI1640 (Biochrom AG, #FG1215) supplemented with 10% FBS (Biochrom AG, #S0115), lx non-essential amino acids (Biochrom AG, #K0293), 10 mM Hepes buffer (Biochrom AG, #L1613), 1 mM sodium pyruvate (Biochrom AG, #L0473) and 100 U/mL penicillin/streptomycin (Biochrom AG, #A2213) at 37° C. in an incubator until needed.

[0743] Target Cell Labeling

[0744] For the analysis of cell lysis in flow cytometry assays, the fluorescent membrane dye DiOC18 (DiO) (Molecular Probes, #V22886) was used to label human CD70- or macaque CD70-transfected CHO cells as target cells and distinguish them from effector cells. Briefly, cells were harvested, washed once with PBS and adjusted to 106 cell/mL in PBS containing 2% (v/v) FBS and the membrane dye DiO (5 μL/106 cells). After incubation for 3 min at 37° C., cells were washed twice in complete RPMI medium and the cell number adjusted to 1.25×105 cells/mL. The vitality of cells was determined using 0.5% (v/v) isotonic EosinG solution (Roth, #45380).

[0745] Flow Cytometry Based Analysis

[0746] This assay was designed to quantify the lysis of cyno or human CD70-transfected CHO cells in the presence of serial dilutions of CD70 bispecific antibody constructs. Equal volumes of DiO-labeled target cells and effector cells (i.e., PBMC w/o CD14+ cells) were mixed, resulting in an E:T cell ratio of 10:1. 160 μl of this suspension were transferred to each well of a 96-well plate. 40 μL of serial dilutions of the CD70×CD3 bispecific antibody constructs and a negative control bispecific (a CD3-based bispecific antibody construct recognizing an irrelevant target antigen) or RPMI complete medium as an additional negative control were added. The bispecific antibody-mediated cytotoxic reaction proceeded for 48 hours in a 7% CO2 humidified incubator. Then cells were transferred to a new 96-well plate and loss of target cell membrane integrity was monitored by adding propidium iodide (PI) at a final concentration of 1 μg/mL. PI is a membrane impermeable dye that normally is excluded from viable cells, whereas dead cells take it up and become identifiable by fluorescent emission.

[0747] Samples were measured by flow cytometry on a FACSCanto II instrument and analyzed by FACSDiva software (both from Becton Dickinson). Target cells were identified as DiO-positive cells. PI-negative target cells were classified as living target cells. Percentage of cytotoxicity was calculated according to the following formula:

$$Cytotoxicity [ \% ] = \frac{{n}_{dead target cells}}{{n}_{target cells}} \times 100$$

$$n = number of events$$

[0748] Using GraphPad Prism 5 software (Graph Pad Software, San Diego), the percentage of cytotoxicity was plotted against the corresponding bispecific antibody construct concentrations. Dose response curves were analyzed with the four parametric logistic regression models for evaluation of sigmoid dose response curves with fixed hill slope and EC50 values were calculated.

### Example 8.5

[0749] Potency of Redirecting Unstimulated Human PBMC Against Human CD70-Transfected CHO Cells

[0750] The cytotoxic activity of CD70×CD3 bispecific antibody constructs was analyzed in a FACS-based cytotoxicity assay using CHO cells transfected with human CD70 as target cells, and unstimulated human PBMC as effector cells. The assay was carried out as described in Example 8.4 above. In a further approach, soluble CD27 was added in a concentration of 1 ng/ml, in order to verify whether the presence of the soluble form of CD27 would impair the cytotoxic activity of the tested antibody constructs.

[0751] The results of the FACS-based cytotoxicity assays are shown in Table 11 for a representative number of antibody constructs in an scFc format with unstimulated human PBMC as effector cells and human CD70-transfected CHO cells as targets. The EC50 values were not significantly influenced by the presence of CD27. See also FIG. 6 which shows the results for the construct CD70-21 D_CCxI2C-scFc.

TABLE 11
EC50 values [pM] of CD70xCD3 (I2C) antibody constructs
as measured in a 48-hour FACS-based cytotoxicity assay
with unstimulated human PBMC as effector cells and CHO
cells transfected with human CD70 as target cells.

| CD70xCD3 bispecific | EC50 [pM] | EC50 [pM] |
|---|---|---|
| antibody construct | w/o sCD27 | w/1 ng/ml sCD27 |
| CD70-13D_CCxI2C-scFc | 0.21 | 0.21 |
| CD70-16D_CCxI2C-scFc | 0.27 | 0.18 |
| CD70-21D_CCxI2C-scFc | 0.22 | 0.17 |
| CD70-24D_CCxI2C-scFc | 0.32 | 0.43 |
| CD70-25D_CCxI2C-scFc | 0.29 | 0.21 |
| CD70_1-G2D_CCxI2C-scFc | 0.49 | 0.25 |
| CD70-27D_CCxI2C-scFc | 0.49 | 0.29 |
| CD70-28D_CCxI2C-scFc | 0.19 | 0.20 |
| CD70-31D_CCxI2C-scFc | 0.48 | 0.60 |
| CD70-32D_CCxI2C-scFc | 0.26 | 0.24 |
| CD70-42D_CCxI2C-scFc | 0.29 | 0.23 |
| CD70-43D_CCxI2C-scFc | 0.22 | 0.15 |
| CD70-48D_CCxI2C-scFc | 0.26 | 0.29 |
| CD70-62D_CCxI2C-scFc | 0.35 | 0.21 |
| CD70-13D_CCxI2C-scFc | 0.25 | 0.18 |

[0752] Expectedly, EC50 values were generally higher in cytotoxicity assays with unstimulated PBMC as effector cells compared with cytotoxicity assays using stimulated human CD8+ T cells (see Example 8.2).

### Example 8.6

[0753] Potency of Redirecting Unstimulated Human PBMC Against a CD70 Positive Human Ovarian Carcinoma Cell Line

[0754] The cytotoxic activity of CD70×CD3 bispecific antibody constructs was furthermore analyzed in a FACS-based cytotoxicity assay using the CD70 positive human ovarian carcinoma cell line OVCAR 8 as a source of target cells and unstimulated human PBMC as effector cells. The assay was carried out as described in Example 8.4 above. The results are shown in Table 12 for a representative number of antibody constructs in an scFc format.

TABLE 12
EC50 values [pM] of CD70xCD3 (I2C) bispecific antibody
constructs as measured in a 48-hour FACS-based cytotoxicity
assay with unstimulated human PBMC as effector cells and
the human cell line SHP-77 as source of target cells.

| CD70xCD3 bispecific | |
|---|---|
| antibody construct | EC50 [pM] |
| CD70-13D_CCxI2C-scFc | 0.07 |
| CD70-16D_CCxI2C-scFc | 0.10 |
| CD70-21D_CCxI2C-scFc | 0.06 |
| CD70-24D_CCxI2C-scFc | 0.50 |
| CD70-25D_CCxI2C-scFc | 0.05 |
| CD70_1-G2D_CCxI2C-scFc | 0.08 |
| CD70-27D_CCxI2C-scFc | 0.56 |
| CD70-28D_CCxI2C-scFc | 0.12 |
| CD70-31D_CCxI2C-scFc | 1.03 |
| CD70-32D_CCxI2C-scFc | 0.06 |
| CD70-42D_CCxI2C-scFc | 0.13 |
| CD70-43D_CCxI2C-scFc | 0.14 |
| CD70-48D_CCxI2C-scFc | 0.14 |
| CD70-62D_CCxI2C-scFc | 0.26 |
| CD70-13D_CCxI2C-scFc | 0.09 |

### Example 8.7

[0755] Potency of Redirecting Macaque T Cells Against Macaque CD70-Expressing CHO Cells

[0756] Finally, the cytotoxic activity of CD70×CD3 bispecific antibody constructs was analyzed in a FACS-based cytotoxicity assay using CHO cells transfected with macaque (cyno) CD70 as target cells, and the macaque T cell line 4119LnPx (Knappe et al. Blood 95:3256-61 (2000)) as source of effector cells. Target cell labeling of macaque CD70-transfected CHO cells and flow cytometry based analysis of cytotoxic activity was performed as described above.

[0757] Results are shown in Table 13 for a representative number of antibody constructs in an scFc format. Macaque T cells from cell line 4119LnPx were induced to efficiently kill macaque CD70-transfected CHO cells by CD70×CD3 (I2C) bispecific antibody constructs according to the invention. The antibody constructs presented potently with sub-picomolar EC50-values in this assay, confirming that they are very active in the macaque system.

TABLE 13
EC50 values [pM] of CD70xCD3 bispecific antibody constructs
as measured in a 48-hour FACS-based cytotoxicity assay with
macaque T cell line 4119LnPx as effector cells and CHO cells
transfected with macaque CD70 as target cells.

| CD70xCD3 bispecific | |
|---|---|
| antibody construct | EC50 [pM] |
| CD70-13D_CCxI2C-scFc | 0.07 |
| CD70-16D_CCxI2C-scFc | 0.03 |
| CD70-21D_CCxI2C-scFc | 0.03 |
| CD70-24D_CCxI2C-scFc | 0.14 |
| CD70-25D_CCxI2C-scFc | 0.03 |
| CD70_1-G2D_CCxI2C-scFc | 0.03 |
| CD70-27D_CCxI2C-scFc | 0.12 |
| CD70-28D_CCxI2C-scFc | 0.08 |
| CD70-31D_CCxI2C-scFc | 0.23 |
| CD70-32D_CCxI2C-scFc | 0.03 |
| CD70-42D_CCxI2C-scFc | 0.05 |
| CD70-43D_CCxI2C-scFc | 0.07 |
| CD70-48D_CCxI2C-scFc | 0.04 |
| CD70-62D_CCxI2C-scFc | 0.04 |
| CD70-13D_CCxI2C-scFc | 0.06 |

### Example 9

[0758] Monomer to Dimer Conversion after (i) Three Freeze/Thaw Cycles and (ii) 7 Days of Incubation at 250 μg/ml

[0759] Bispecific CD70×CD3 antibody monomeric construct was subjected to different stress conditions followed by high performance SEC to determine the percentage of initially monomeric antibody construct, which had been converted into dimeric antibody construct.

[0760] (i) 25 μg of monomeric antibody construct were adjusted to a concentration of 250 μg/ml with generic formulation buffer and then frozen at −80° C. for 30 min followed by thawing for 30 min at room temperature. After three freeze/thaw cycles the dimer content was determined by HP-SEC.

[0761] (ii) 25 μg of monomeric antibody construct were adjusted to a concentration of 250 μg/ml with generic formulation buffer followed by incubation at 37° C. for 7 days. The dimer content was determined by HP-SEC.

[0762] A high resolution SEC Column TSK Gel G3000 SWXL (Tosoh, Tokyo-Japan) was connected to an Äkta Purifier 10 FPLC (GE Lifesciences) equipped with an A905 Autosampler. Column equilibration and running buffer consisted of 100 mM KH2PO4-200 mM Na2SO4 adjusted to pH 6.6. The antibody solution (25 μg protein) was applied to the equilibrated column and elution was carried out at a flow rate of 0.75 ml/min at a maximum pressure of 7 MPa. The whole run was monitored at 280, 254 and 210 nm optical absorbance. Analysis was done by peak integration of the 210 nm signal recorded in the Äkta Unicorn software run evaluation sheet. Dimer content was calculated by dividing the area of the dimer peak by the total area of monomer plus dimer peak.

[0763] The results are shown in Table 14 for a representative number of antibody constructs in an scFc format. The CD70×CD3 (I2C) bispecific antibody constructs of the invention presented with dimer percentages of ≦1.5% (with most of the constructs presenting with a dimer percentage of ≦1.0%) after three freeze/thaw cycles, and with dimer percentages of ≦0.6% (with most of the constructs presenting with a dimer percentage of 0%) after 7 days of incubation at 37° C.

TABLE 14
Percentage of monomeric versus dimeric CD70xCD3 bispecific
antibody constructs as determined by High Performance
Size Exclusion Chromatography (HP-SEC).

| | Percentage of dimer | Percentage of dimer |
|---|---|---|
| CD70xCD3 bispecific | after 7 days of | after three freeze/ |
| antibody construct | incubation at 37° C. | thaw cycles |
| CD70-13D_CCxI2C-scFc | 0.1 | 0.4 |
| CD70-16D_CCxI2C-scFc | 0.0 | 0.0 |
| CD70-21D_CCxI2C-scFc | 0.0 | 0.2 |
| CD70-24D_CCxI2C-scFc | 0.3 | 1.1 |
| CD70-25D_CCxI2C-scFc | 0.3 | 0.2 |
| CD70_1-G2D_CCxI2C-scFc | 0.0 | 0.4 |
| CD70-27D_CCxI2C-scFc | 0.0 | 1.5 |
| CD70-28D_CCxI2C-scFc | 0.3 | 0.1 |
| CD70-31D_CCxI2C-scFc | 0.0 | 1.5 |
| CD70-32D_CCxI2C-scFc | 0.0 | 0.8 |
| CD70-42D_CCxI2C-scFc | 0.0 | 0.3 |
| CD70-43D_CCxI2C-scFc | 0.0 | 0.4 |
| CD70-48D_CCxI2C-scFc | 0.6 | 0.5 |
| CD70-62D_CCxI2C-scFc | 0.0 | 0.8 |
| CD70-13D_CCxI2C-scFc | 0.0 | 0.7 |

### Example 10

[0764] Thermostability

[0765] Antibody aggregation temperature was determined as follows: 40 μl of antibody construct solution at 250 μg/ml were transferred into a single use cuvette and placed in a Wyatt Dynamic Light Scattering device DynaPro Nanostar (Wyatt). The sample was heated from 40° C. to 70° C. at a heating rate of 0.5° C./min with constant acquisition of the measured radius. Increase of radius indicating melting of the protein and aggregation was used by the software package delivered with the DLS device to calculate the aggregation temperature of the antibody construct.

[0766] All tested CD70×CD3 (I2C) bispecific antibody constructs of the invention showed thermal stability with aggregation temperatures ≧52.0° C., as shown in Table 15 below for a representative number of antibody constructs in an scFc format.

TABLE 15
Thermostability of the CD70xCD3 bispecific antibody constructs
as determined by DLS (dynamic light scattering)

| | Thermostability |
|---|---|
| CD70xCD3 bispecific | (DLS ° C. |
| antibody construct | aggregation) |
| CD70-13D_CCxI2C-scFc | 52.4 |
| CD70-16D_CCxI2C-scFc | 57.7 |
| CD70-21D_CCxI2C-scFc | 57.3 |
| CD70-24D_CCxI2C-scFc | 57.4 |
| CD70-25D_CCxI2C-scFc | 57.6 |
| CD70_1-G2D_CCxI2C-scFc | 57.7 |
| CD70-27D_CCxI2C-scFc | 57.5 |
| CD70-28D_CCxI2C-scFc | 57.5 |
| CD70-31D_CCxI2C-scFc | 56.4 |
| CD70-32D_CCxI2C-scFc | 57.7 |
| CD70-42D_CCxI2C-scFc | 57.6 |
| CD70-43D_CCxI2C-scFc | 57.2 |
| CD70-48D_CCxI2C-scFc | 56.7 |
| CD70-62D_CCxI2C-scFc | 55.5 |
| CD70-13D_CCxI2C-scFc | 57.7 |

### Example 11

[0767] Stability after Incubation for 24 Hours in Human Plasma

[0768] Purified bispecific antibody constructs were incubated at a ratio of 1:5 in a human plasma pool at 37° C. for 96 hours at a final concentration of 2-20 μg/ml. After plasma incubation the antibody constructs were compared in a 51-chromium release assay with stimulated enriched human CD8+ T cells and human CD70-transfected CHO cells at a starting concentration of 0.01-0.1 μg/ml and with an effector to target cell (E:T) ratio of 10:1 (assay as described in Example 8.1). Non-incubated, freshly thawed bispecific antibody constructs were included as controls.

[0769] The results are shown in Table 16 for a representative number of antibody constructs in an scFc format. Most tested antibody constructs had a very favourable plasma stability (EC50 plasma/EC50 control) of ≦3.0 or ≦2.5.

TABLE 16
EC50 values of the CD70xCD3 (I2C) antibody constructs with and
without plasma incubation and calculated plasma/control value

| | | | Plasma to |
|---|---|---|---|
| | | | Control ratio |
| CD70xCD3 bispecific | EC₅₀ [pM] | | (EC₅₀ plasma/ |
| antibody construct | w/plasma | w/o plasma | EC₅₀ control) |
| CD70-13D_CCxI2C-scFc | 0.06 | 0.07 | 0.8 |
| CD70-16D_CCxI2C-scFc | 0.01 | 0.005 | 1.8 |
| CD70-21D_CCxI2C-scFc | 0.05 | 0.06 | 0.9 |
| CD70-24D_CCxI2C-scFc | n.a. | 0.15 | n.a. |
| CD70-25D_CCxI2C-scFc | 0.00 | 0.01 | 0.2 |
| CD70_1-G2D_CCxI2C-scFc | 0.07 | 0.01 | 6.8 |
| CD70-27D_CCxI2C-scFc | 0.08 | 0.08 | 1.1 |
| CD70-28D_CCxI2C-scFc | 0.01 | 0.03 | 0.5 |
| CD70-31D_CCxI2C-scFc | 0.18 | 0.11 | 1.6 |
| CD70-32D_CCxI2C-scFc | 0.03 | 0.08 | 0.4 |
| CD70-42D_CCxI2C-scFc | 0.07 | 0.05 | 1.4 |
| CD70-43D_CCxI2C-scFc | 0.11 | 0.08 | 1.4 |
| CD70-48D_CCxI2C-scFc | 0.03 | 0.01 | 3.0 |
| CD70-62D_CCxI2C-scFc | 0.05 | 0.02 | 2.2 |
| CD70-13D_CCxI2C-scFc | 0.02 | 0.05 | 0.3 |

### Example 12

[0770] Turbidity at 2500 μg/ml Antibody Concentration

[0771] 1 ml of purified antibody construct solution of a concentration of 250 μg/ml was concentrated by spin concentration units to 2500 μg/ml. After 16 h storage at 5° C. the turbidity of the antibody solution was determined by OD340 nm optical absorption measurement against the generic formulation buffer.

[0772] The results are shown in Table 17 for a representative number of CD70×CD3 (I2C) antibody constructs in an scFc format. All tested antibody constructs have a very favourable turbidity of ≦0.05.

TABLE 17
Turbidity of the antibody constructs after
concentration to 2.5 mg/ml over night

| CD70xCD3 bispecific | Turbidity at 2500 μg/ml |
|---|---|
| antibody construct | [OD340] |
| CD70-13D_CCxI2C-scFc | 0.023 |
| CD70-16D_CCxI2C-scFc | 0.017 |
| CD70-21D_CCxI2C-scFc | 0.015 |
| CD70-24D_CCxI2C-scFc | 0.019 |
| CD70-25D_CCxI2C-scFc | 0.027 |
| CD70_1-G2D_CCxI2C-scFc | 0.022 |
| CD70-27D_CCxI2C-scFc | 0.034 |
| CD70-28D_CCxI2C-scFc | 0.011 |
| CD70-31D_CCxI2C-scFc | 0.015 |
| CD70-32D_CCxI2C-scFc | 0.024 |
| CD70-42D_CCxI2C-scFc | 0.019 |
| CD70-43D_CCxI2C-scFc | 0.023 |
| CD70-48D_CCxI2C-scFc | 0.023 |
| CD70-62D_CCxI2C-scFc | 0.031 |
| CD70-13D_CCxI2C-scFc | 0.017 |

### Example 13

[0773] Protein Homogeneity by High Resolution Cation Exchange Chromatography

[0774] The protein homogeneity the antibody constructs of the invention was analyzed by high resolution cation exchange chromatography CIEX.

[0775] 50 μg of antibody construct monomer were diluted with 50 ml binding buffer A (20 mM sodium dihydrogen phosphate, 30 mM NaCl, 0.01% sodium octanate, pH 5.5), and 40 ml of this solution were applied to a 1 ml BioPro SP-F column (YMC, Germany) connected to an Äkta Micro FPLC device (GE Healthcare, Germany). After sample binding, a wash step with further binding buffer was carried out. For protein elution, a linear increasing salt gradient using buffer B (20 mM sodium dihydrogen phosphate, 1000 mM NaCl, 0.01% sodium octanate, pH 5.5) up to 50% percent buffer B was applied over 10 column volumes. The whole run was monitored at 280, 254 and 210 nm optical absorbance. Analysis was done by peak integration of the 280 nm signal recorded in the Äkta Unicorn software run evaluation sheet.

[0776] The results are shown in Table 18 for a representative number of CD70×CD3 (I2C) antibody constructs in an scFc format. All tested antibody constructs have a favourable homogeneity of ≧60% (area under the curve (=AUC) of the main peak), nine out of 15 constructs have a homogeneity of ≧70%.

TABLE 18
Protein homogeneity of the antibody
constructs (% AUC of main peak)

| CD70xCD3 bispecific | Protein homogeneity |
|---|---|
| antibody construct | % AUC of main peak |
| CD70-13D_CCxI2C-scFc | 81 |
| CD70-16D_CCxI2C-scFc | 79 |
| CD70-21D_CCxI2C-scFc | 74 |
| CD70-24D_CCxI2C-scFc | 73 |
| CD70-25D_CCxI2C-scFc | 71 |
| CD70_1-G2D_CCxI2C-scFc | 69 |
| CD70-27D_CCxI2C-scFc | 70 |
| CD70-28D_CCxI2C-scFc | 67 |
| CD70-31D_CCxI2C-scFc | 68 |
| CD70-32D_CCxI2C-scFc | 76 |
| CD70-42D_CCxI2C-scFc | 67 |
| CD70-43D_CCxI2C-scFc | 62 |
| CD70-48D_CCxI2C-scFc | 70 |
| CD70-62D_CCxI2C-scFc | 66 |
| CD70-13D_CCxI2C-scFc | 73 |

### Example 14

[0777] Surface Hydrophobicity as Measured by HIC Butyl

[0778] The surface hydrophobicity of bispecific antibody constructs of the invention was tested in Hydrophobic Interaction Chromatography HIC in flow-through mode.

[0779] 50 μg of antibody construct monomer were diluted with generic formulation buffer to a final volume of 500 μl (10 mM citric acid, 75 mM lysine HCl, 4% trehalose, pH 7.0) and applied to a 1 ml Butyl Sepharose FF column (GE Healthcare, Germany) connected to a Äkta Purifier FPLC system (GE Healthcare, Germany). The whole run was monitored at 280, 254 and 210 nm optical absorbance. Analysis was done by peak integration of the 280 nm signal recorded in the Äkta Unicorn software run evaluation sheet. Elution behavior was evaluated by comparing area and velocity of rise and decline of protein signal thereby indicating the strength of interaction of the BiTE albumin fusion with the matrix.

[0780] A representative number of CD70×CD3 (I2C) antibody constructs in an scFc format was analysed and shown to have a good elution behaviour, which was mostly rapid and complete.

### Example 15

[0781] Potency Gap Between the Monomeric and the Dimeric Isoform of Bispecific Antibody Constructs

[0782] In order to determine the difference in cytotoxic activity between the monomeric and the dimeric isoform of individual CD70×CD3 bispecific antibody constructs (referred to as potency gap), an 18 hour 51-chromium release cytotoxicity assay was carried out as described hereinabove (Example 8.1) with purified bispecific antibody construct monomer and dimer. Effector cells were stimulated enriched human CD8+ T cells. Target cells were hu CD70 transfected CHO cells. Effector to target cell (E:T) ratio was 10:1. The potency gap was calculated as ratio between EC50 values.

[0783] Results are shown in Table 19 for a representative number of antibody constructs in an scFc format. Potency gaps of the tested CD70×CD3 (I2C) bispecific antibody constructs were between 0.0 and 1.5. There is hence no substantially more active dimer compared to its respective monomer.

TABLE 19
Potency gap between the monomeric and the dimeric isoform

| | | | Ratio |
|---|---|---|---|
| CD70xCD3 bispecific | EC₅₀ [pM] | EC₅₀ [pM] | EC₅₀ monomer/ |
| antibody construct | Monomer | dimer | EC₅₀ dimer |
| CD70-13D_CCxI2C-scFc | 0.07 | 0.11 | 0.6 |
| CD70-16D_CCxI2C-scFc | 0.005 | 0.07 | 0.1 |
| CD70-21D_CCxI2C-scFc | 0.06 | 0.04 | 1.5 |
| CD70-24D_CCxI2C-scFc | 0.15 | 0.24 | 0.6 |
| CD70-25D_CCxI2C-scFc | 0.01 | 0.09 | 0.1 |
| CD70_1-G2D_CCxI2C-scFc | 0.01 | 0.06 | 0.2 |
| CD70-27D_CCxI2C-scFc | 0.08 | 0.25 | 0.3 |
| CD70-28D_CCxI2C-scFc | 0.03 | 0.09 | 0.3 |
| CD70-31D_CCxI2C-scFc | 0.11 | 0.24 | 0.5 |
| CD70-32D_CCxI2C-scFc | 0.08 | 0.23 | 0.3 |
| CD70-42D_CCxI2C-scFc | 0.05 | 70 | 0.0 |
| CD70-43D_CCxI2C-scFc | 0.08 | 0.20 | 0.4 |
| CD70-48D_CCxI2C-scFc | 0.01 | 0.09 | 0.1 |
| CD70-62D_CCxI2C-scFc | 0.02 | 0.17 | 0.1 |
| CD70-13D_CCxI2C-scFc | 0.05 | 0.12 | 0.4 |

### Example 16

[0784] CD27 does not Inhibit Binding of Anti-CD70 scFv Molecules

[0785] This assay was carried out to test whether the soluble form of CD27 (136-458 μg/ml soluble CD27 in human serum; Huang J. et al. (2013) J Immunol 190: 1-9) would impair binding of the anti-CD70 binding domains according to the invention to CD70.

[0786] To verify binding of human CD27 to CHO cells transfected with human CD70, cells were incubated with human CD27 for 30 minutes at 4° C. (1 μg/ml; R&D #382-CD-100). Bound CD27 was detected with an anti-HIS antibody (5 μg/ml; AbD Serotec) followed by an anti-mouse IgG Fc-gamma-PE (1:100; Jackson Immunoresearch #115-116-071). As negative control cells were incubated with PBS/2% FCS instead of CD27.

[0787] To test replacement of anti-CD70 scFv by CD27, CHO cells transfected with human CD70 were incubated with or without CD27 for 30 minutes at 4° C. (1 μg/ml; R&D #382-CD-100). Afterwards cells were washed twice and then stained with crude, undiluted periplasmic extract containing scFv binding to CD70. Bound scFv was detected with mouse monoclonal anti-FLAG M2 antibody (1 μg/ml; Sigma F1804) followed by an anti-mouse IgG Fc-gamma-PE (1:100; Jackson Immunoresearch #115-116-071). As negative control, cells were incubated with an unspecific scFv instead of anti-CD70 scFv. CD27 and all antibodies were diluted in PBS with 2% FCS.

[0788] No competition between soluble CD27 and the anti-CD70 scFv was observed for any of the CD70 binders of the present invention that were analyzed.

Lengthy table referenced here
US20170129961A1-20170511-T00001
Please refer to the end of the specification for access instructions.

LENGTHY TABLES
The patent application contains a lengthy table section. A copy of the table is available in electronic form from the USPTO web site (http://seqdata.uspto.gov/?pageRequest=docDetail&DocID=US20170129961A1). An electronic copy of the table will also be available from the USPTO upon request and payment of the fee set forth in 37 CFR 1.19(b)(3).

1. A bispecific antibody construct comprising a first binding domain which binds to human CD70 on the surface of a target cell and a second binding domain which binds to human CD3 on the surface of a T cell and at least macaque CD3.

2. The antibody construct according to claim 1, wherein the first binding domain comprises a VH region comprising CDR-H1, CDR-H2 and CDR-H3 and a VL region comprising CDR-L1, CDR-L2 and CDR-L3, wherein
said CDR-H1 comprises the amino acid sequence X₁YX₂MX₃ (SEQ ID NO: 1869), wherein X₁ is S, T or V, X₂ is A or S, and X₃ is S or N;
said CDR-H2 comprises the amino acid sequence X₁ISX₂SGGX₃X₄X₅X₆AESVX₇G (SEQ ID NO: 1870), wherein X₁ is A, Y, V, L, or T, X₂ is G or S, X₃ is R, Y, S, G or I, X₄ is T, I, P, or A, X₅ is F, Y, N, Q or D, X₆ is Y or F, and X₇ is E, K or Q;
said CDR-H3 comprises the amino acid sequence X₁DYSNYX₂X₃FDY (SEQ ID NO: 1871), wherein X₁ is H, G or V, X₂ is P, A, L or F, and X₃ is Y or F;
said CDR-L1 comprises the amino acid sequence RAX₁QX₂X₃X₄X₅X₆X₇LX₈ (SEQ ID NO: 1872), wherein X₁ is S or G, X₂ is S or G, X₃ is I or V, X₄ is R, S or no amino acid, X₅ is S or G, X₆ is S, N, T or D, X₇ is Y or no amino acid, and X₈ is A or G;
said CDR-L2 comprises the amino acid sequence X₁X₂SX₃X₄X₅X₆ (SEQ ID NO: 1873), wherein X₁ is G or A, X₂ is A or S, X₃ is S, T, N or I, X₄ is R or L, X₅ is A or Q, and X₆ is T or S; and
said CDR-L3 comprises the amino acid sequence QQYX₁X₂X₃PX₄X₅ (SEQ ID NO: 1874), wherein X₁ is G, Y or F, X₂ is D, S, Y, I or A, X₃ is L, T, S or Y, X₄ is F, L, P or I, and X₅ is T or P.

3. The antibody construct according to claim 1, wherein the first binding domain comprises a VH region comprising CDR-H1, CDR-H2 and CDR-H3 and a VL region comprising CDR-L1, CDR-L2 and CDR-L3, wherein
said CDR-H1 comprises the amino acid sequence SYSMN (SEQ ID NO: 1422) or X₁YAMS (SEQ ID NO: 1875), wherein X₁ is S, T or V;
said CDR-H2 comprises an amino acid sequence selected from the group consisting of: the amino acid sequence YISSSGGYIYYAESVKG (SEQ ID NO: 1423), the amino acid sequence VISGSGGITDFAESVKG (SEQ ID NO: 1367) and the amino acid sequence X₁ISGSGGX₂X₃X₄YAESVX₅G (SEQ ID NO: 1876), wherein X₁ is A, V, L or T, X₂ is R, 5, or G, X₃ is T, P or A, X₄ is F, N, Y or Q, and X₅ is E, K, or Q;
said CDR-H3 comprises an amino acid sequence selected from the group consisting of: the amino acid sequence GDYSNYAYFDY (SEQ ID NO: 1424), the amino acid sequence HDYSNYFFFDY (SEQ ID NO: 1368), and the amino acid sequence X₁DYSNYX₂X₃FDY (SEQ ID NO: 1877), wherein X₁ is H or V, X₂ is P, L or A, and X₃ is Y or F;
said CDR-L1 comprises the amino acid sequence RASQGISNYLA (SEQ ID NO: 1425) or the amino acid sequence RAX₁QX₂X₃X₄X₅X₆YLX₇ (SEQ ID NO: 1878), wherein X₁ is S or G, X₂ is S or G, X₃ is I or V, X₄ is R or S, X₅ is S or G, X₆ is S, T, N or D, and X₇ is A or G;
said CDR-L2 comprises the amino acid sequence AASXLQS (SEQ ID NO: 1879), wherein X is T or I, or GX₁SX₂RAT (SEQ ID NO: 1880), wherein X₁ is A or S, and X₂ is S or N; and
said CDR-L3 comprises an amino acid sequence selected from the group consisting of: the amino acid sequence QQYYSTPLT (SEQ ID NO: 1427), the amino acid sequence QQYFAYPIT (SEQ ID NO: 1371), and the amino acid sequence QQYGX₁X₂PX₃X₄ (SEQ ID NO: 1881), wherein X₁ is D, Y, S or I, X₂ is L, S or T, X₃ is F or P, and X₄ is T or P.

4. The antibody construct according to claim 1, wherein the first binding domain comprises a VH region comprising CDR-H1, CDR-H2 and CDR-H3 and a VL region comprising CDR-L1, CDR-L2 and CDR-L3, wherein
said CDR-H1 comprises the amino acid sequence X₁YAMS (SEQ ID NO: 1875), wherein X₁ is S, T or V;
said CDR-H2 comprises the amino acid sequence X₁ISGSGGX₂X₃X₄YAESVX₅G (SEQ ID NO: 1876), wherein X₁ is A, V, L or T, X₂ is R, S, or G, X₃ is T, P or A, X₄ is F, N, Y or Q, and X₅ is E, K, or Q;
said CDR-H3 comprises the amino acid sequence X₁DYSNYX₂X₃FDY (SEQ ID NO: 1877), wherein X₁ is H or V, X₂ is P, L or A, and X₃ is Y or F;
said CDR-L1 comprises the amino acid sequence RAX₁QX₂X₃X₄X₅X₆YLX₇ (SEQ ID NO: 1878), wherein X₁ is S or G, X₂ is S or G, X₃ is I or V, X₄ is R or S, X₅ is S or G, X₆ is S, T, N or D, and X₇ is A or G;
said CDR-L2 comprises the amino acid sequence GX₁SX₂RAT (SEQ ID NO: 1880), wherein X₁ is A or S, and X₂ is S or N; and
said CDR-L3 comprises the amino acid sequence QQYGX₁X₂PX₃X₄ (SEQ ID NO: 1881), wherein X₁ is D, Y, S or I, X₂ is L, S or T, X₃ is F or P, and X₄ is T or P.

5. The antibody construct according to claim 1, wherein the first binding domain comprises a VH region comprising CDR-H1, CDR-H2 and CDR-H3 and a VL region comprising CDR-L1, CDR-L2 and CDR-L3, wherein
said CDR-H1 comprises the amino acid sequence selected from the group consisting of: the amino acid sequence SYAMS (SEQ ID NO: 1044), the amino acid sequence TYAMS (SEQ ID NO: 1142), the amino acid sequence VYAMS (SEQ ID NO: 1436), and the amino acid sequence SYSMN (SEQ ID NO: 1422);
said CDR-H2 comprises the amino acid sequence selected from the group consisting of: the amino acid sequence AISGSGGRTFYAESVEG (SEQ ID NO: 1087), the amino acid sequence VISGSGGRPNYAESVKG (SEQ ID NO: 1045), the amino acid sequence AISGSGGSTFYAESVKG (SEQ ID NO: 1171), the amino acid sequence AISGSGGSTFYAESVQG (SEQ ID NO: 1213), the amino acid sequence AISGSGGGTFYAESVKG (SEQ ID NO: 1227), the amino acid sequence LISGSGGRTYYAESVKG (SEQ ID NO: 1241), the amino acid sequence AISGSGGRAQYAESVQG (SEQ ID NO: 1255), the amino acid sequence TISGSGGSTFYAESVKG (SEQ ID NO: 1437), the amino acid sequence YISSSGGYIYYAESVKG (SEQ ID NO: 1423), and the amino acid sequence VISGSGGITDFAESVKG (SEQ ID NO: 1367);
said CDR-H3 comprises the amino acid sequence selected from the group consisting of: the amino acid sequence HDYSNYPYFDY (SEQ ID NO: 1088), the amino acid sequence VDYSNYLFFDY (SEQ ID NO: 1046), the amino acid sequence HDYSNYAYFDY (SEQ ID NO: 1438), the amino acid sequence GDYSNYAYFDY (SEQ ID NO: 1424), and the amino acid sequence HDYSNYFFFDY (SEQ ID NO: 1368);
said CDR-L1 comprises the amino acid sequence selected from the group consisting of: the amino acid sequence RASQSIRSSYLA (SEQ ID NO: 1089), the amino acid sequence RASQSVRSTYLA (SEQ ID NO: 1145), the amino acid sequence RAGQSVRSSYLG (SEQ ID NO: 1047), the amino acid sequence RASQSVRSSYLA (SEQ ID NO: 1173), the amino acid sequence RASQSVRSNYLA (SEQ ID NO: 1187), the amino acid sequence RASQSVRGNYLA (SEQ ID NO: 1215), the amino acid sequence the amino acid sequence RASQSIRSNYLA (SEQ ID NO: 1229), the amino acid sequence RASQSVSSNLA (SEQ ID NO: 1257), the amino acid sequence RASQGVRSDYLA (SEQ ID NO: 1271), the amino acid sequence RASQGVRSSYLA (SEQ ID NO: 1341), and the amino acid sequence RASQGISNYLA (SEQ ID NO: 1369);
said CDR-L2 comprises the amino acid sequence selected from the group consisting of: the amino acid sequence GASSRAT (SEQ ID NO: 1048), the amino acid sequence GASNRAT (SEQ ID NO: 1244), the amino acid sequence GSSSRAT (SEQ ID NO: 1258), the amino acid sequence AASTLQS (SEQ ID NO: 1426), and the amino acid sequence AASILQS (SEQ ID NO: 1370); and
said CDR-L3 comprises the amino acid sequence selected from the group consisting of: the amino acid sequence QQYGDLPFT (SEQ ID NO: 1091); the amino acid sequence QQYGYSPPT (SEQ ID NO: 1049), the amino acid sequence QQYGYSPFT (SEQ ID NO: 1217), the amino acid sequence QQYGSSPFT (SEQ ID NO: 1231), the amino acid sequence QQYGISPPT (SEQ ID NO: 1245), the amino acid sequence QQYGSSPPP (SEQ ID NO: 1259), the amino acid sequence QQYGSTPPT (SEQ ID NO: 1273), the amino acid sequence QQYGSSPPT (SEQ ID NO: 1343), the amino acid sequence QQYYSTPLT (SEQ ID NO: 1427), and the amino acid sequence QQYFAYPIT (SEQ ID NO: 1371).

6. The antibody construct according to claim 1, wherein the first binding domain comprises a VH region comprising CDR-H1, CDR-H2 and CDR-H3 and a VL region comprising CDR-L1, CDR-L2 and CDR-L3, wherein the amino acid sequences of said CDR-H1, CDR-H2, CDR-H3, CDR-L1, CDR-L2 and CDR-L3 are selected from the group consisting of:
(a) the amino acid sequences of SEQ: ID NOs: 1044-1049;
(b) the amino acid sequences of SEQ: ID NOs: 1086-1091;
(c) the amino acid sequences of SEQ: ID NOs: 1142-1147;
(d) the amino acid sequences of SEQ: ID NOs: 1170-1175;
(e) the amino acid sequences of SEQ: ID NOs: 1184-1189;
(f) the amino acid sequences of SEQ: ID NOs: 1212-1217;
(g) the amino acid sequences of SEQ: ID NOs: 1226-1231;
(h) the amino acid sequences of SEQ: ID NOs: 1240-1245;
(i) the amino acid sequences of SEQ: ID NOs: 1254-1259;
(j) the amino acid sequences of SEQ: ID NOs: 1268-1273;
(k) the amino acid sequences of SEQ: ID NOs: 1338-1343;
(l) the amino acid sequences of SEQ: ID NOs: 1352-1357;
(m) the amino acid sequences of SEQ: ID NOs: 1366-1371;
(n) the amino acid sequences of SEQ: ID NOs: 1422-1427; and
(o) the amino acid sequences of SEQ: ID NOs: 1436-1441.

7. The antibody construct according to claim 1, wherein the first binding domain comprises a VH region comprising the amino acid sequence selected from the group consisting of: SEQ ID NO: 1050, SEQ ID NO: 1092, SEQ ID NO: 1148, SEQ ID NO: 1176, SEQ ID NO: 1190, SEQ ID NO: 1218, SEQ ID NO: 1232, SEQ ID NO: 1246, SEQ ID NO: 1260, SEQ ID NO: 1274, SEQ ID NO: 1344, SEQ ID NO: 1358, SEQ ID NO: 1372, SEQ ID NO: 1428, and SEQ ID NO: 1442.

8. The antibody construct according to claim 1, wherein the first binding domain comprises a VL region comprising the amino acid sequence selected from the group consisting of: SEQ ID NO: 1051, SEQ ID NO: 1093, SEQ ID NO: 1149, SEQ ID NO: 1177, SEQ ID NO: 1191, SEQ ID NO: 1219, SEQ ID NO: 1233, SEQ ID NO: 1247, SEQ ID NO: 1261, SEQ ID NO: 1275, SEQ ID NO: 1345, SEQ ID NO: 1359, SEQ ID NO: 1373, SEQ ID NO: 1429, and SEQ ID NO: 1443.

9. The antibody construct according to claim 1, wherein the first binding domain comprises a VH region and a VL region comprising the pair of amino acid sequences, respectively, selected from the group consisting of: SEQ ID NOs: 1050+1051, SEQ ID NOs: 1092+1093, SEQ ID NOs: 1148+1149, SEQ ID NOs: 1176+1177, SEQ ID NOs: 1190+1191, SEQ ID NOs: 1218+1219, SEQ ID NOs: 1232+1233, SEQ ID NOs: 1246+1247, SEQ ID NOs: 1260+1261, SEQ ID NOs: 1274+1275, SEQ ID NOs: 1344+1345, SEQ ID NOs: 1358+1359, NOs: 1372+1373, SEQ ID NOs: 1428+1429, and SEQ ID NOs: 1442+1443.

10. The antibody construct according to claim 1, wherein the first binding domain comprises a polypeptide comprising the amino acid sequence selected from the group consisting of: SEQ ID NO: 1052, SEQ ID NO: 1094, SEQ ID NO: 1150, SEQ ID NO: 1178, SEQ ID NO: 1192, SEQ ID NO: 1220, SEQ ID NO: 1234, SEQ ID NO: 1248, SEQ ID NO: 1262, SEQ ID NO: 1276, SEQ ID NO: 1346, SEQ ID NO: 1360, SEQ ID NO: 1374, SEQ ID NO: 1430, and SEQ ID NO: 1444.

11. The antibody construct according to claim 1 comprising a polypeptide comprising the amino acid sequence selected from the group consisting of: SEQ ID NO: 1053, SEQ ID NO: 1095, SEQ ID NO: 1151, SEQ ID NO: 1179, SEQ ID NO: 1193, SEQ ID NO: 1221, SEQ ID NO: 1235, SEQ ID NO: 1249, SEQ ID NO: 1263, SEQ ID NO: 1277, SEQ ID NO: 1347, SEQ ID NO: 1361, SEQ ID NO: 1375, SEQ ID NO: 1431, and SEQ ID NO: 1445.

12. The antibody construct according to claim 1 comprising a polypeptide comprising the amino acid sequence selected from the group consisting of: SEQ ID NO: 1696, SEQ ID NO: 1702, SEQ ID NO: 1710, SEQ ID NO: 1714, SEQ ID NO: 1716, SEQ ID NO: 1720, SEQ ID NO: 1722, SEQ ID NO: 1724, SEQ ID NO: 1726, SEQ ID NO: 1728, SEQ ID NO: 1738, SEQ ID NO: 1740, SEQ ID NO: 1742, SEQ ID NO: 1750, and SEQ ID NO: 1752.

13. The antibody construct according to claim 1, wherein the first binding domain further binds to macaque CD70, preferably to Macaca fascicularis CD70.

14. The antibody construct according to claim 1, wherein the second binding domain binds to human CD3 epsilon and to Callithrix jacchus, Saguinus Oedipus or Saimiri sciureus CD3 epsilon.

15. The antibody construct according to claim 1, wherein the antibody construct is in a format selected from the group consisting of (scFv)₂, scFv-single domain mAb, diabodies and oligomers of the foregoing formats.

16. A polynucleotide encoding the antibody construct according to claim 1.

17. A vector comprising the polynucleotide according to claim 16.

18. A host cell transformed or transfected with the polynucleotide according to claim 16.

19. A process for producing the antibody construct according to claim 1, said process comprising culturing a host cell comprising a polynucleotide encoding a bispecific antibody construct comprising a first binding domain which binds to human CD70 on the surface of a target cell and a second binding domain which binds to human CD3 on the surface of a T cell and at least macaque CD3 under conditions allowing the expression of said antibody construct, and recovering the produced antibody construct from the culture.

20. A pharmaceutical composition comprising the antibody construct according to claim 1 and a carrier, stabilizer, excipient, diluent, solubilizer, surfactant, emulsifier, preservative, or adjuvant.

21. (canceled)

22. A method for treating or ameliorating a tumor, cancer disease or metastatic cancer disease, comprising the step of administering to a subject in need thereof an effective amount of the antibody construct according to claim 1.

23. The method according to claim 22, wherein the tumor or cancer disease is selected from the group consisting of renal, lung, pancreatic, ovarian, breast, colon, head and neck, stomach, rectal, thymic, and brain tumor or cancer, leukemia, lymphoma, melanoma, Kaposi's Sarcoma, embryonal carcinoma, and a metastatic cancer disease derived from any of the foregoing.

24. A kit comprising the antibody construct according to claim 1 and a recipient and, optionally, directions for use.

The application's sequence listing, which the Patent Office published only in electronic form, follows.

SEQUENCE LISTING (1881 sequences)

SEQ ID NO: 1 - protein, 5 aa, Artificial Sequence
  Synthetic peptide
TYGMH

SEQ ID NO: 2 - protein, 17 aa, Artificial Sequence
  Synthetic peptide
VIWYDGSNKYYGDSVKG

SEQ ID NO: 3 - protein, 11 aa, Artificial Sequence
  Synthetic peptide
DNSHYYYGMDV

SEQ ID NO: 4 - protein, 14 aa, Artificial Sequence
  Synthetic peptide
TGSSSNIGAGYDVN

SEQ ID NO: 5 - protein, 7 aa, Artificial Sequence
  Synthetic peptide
VNNNRPS

SEQ ID NO: 6 - protein, 11 aa, Artificial Sequence
  Synthetic peptide
QSYDTSLSASV

SEQ ID NO: 7 - protein, 120 aa, Artificial Sequence
  Synthetic peptide
QVQLVESGGGVVQPGRSLRLSCAASGFTFSTYGMHWVRQAPGKGLEWVAVIWYDGSNKYYGDSVKGRFTISRDNSKNTLYLQMNSLRAEDTAVYYCARDNSHYYYGMDVWGQGTTVTVSS

SEQ ID NO: 8 - protein, 111 aa, Artificial Sequence
  Synthetic peptide
QSVLTQPPSVSGAPGQRVTISCTGSSSNIGAGYDVNWYQQFPGTAPKLLIYVNNNRPSGVPDRFSGSTSGTSASLAITGLQAEDEADYYCQSYDTSLSASVFGGGTRLTVL

SEQ ID NO: 9 - protein, 247 aa, Artificial Sequence
  Synthetic peptide
QVQLVESGGGVVQPGRSLRLSCAASGFTFSTYGMHWVRQAPGKGLEWVAVIWYDGSNKYYGDSVKGRFTISRDNSKNTLYLQMNSLRAEDTAVYYCARDNSHYYYGMDVWGQGTTVTVSSGGGGSGGGGSGGGGSQSVLTQPPSVSGAPGQRVTISCTGSSSNIGAGYDVNWYQQFPGTAPKLLIYVNNNRPSGVPDRFSGSTSGTSASLAITGLQAEDEADYYCQSYDTSLSASVFGGGTRLTVLS

SEQ ID NO: 10 - protein, 501 aa, Artificial Sequence
  Synthetic peptide
QVQLVESGGGVVQPGRSLRLSCAASGFTFSTYGMHWVRQAPGKGLEWVAVIWYDGSNKYYGDSVKGRFTISRDNSKNTLYLQMNSLRAEDTAVYYCARDNSHYYYGMDVWGQGTTVTVSSGGGGSGGGGSGGGGSQSVLTQPPSVSGAPGQRVTISCTGSSSNIGAGYDVNWYQQFPGTAPKLLIYVNNNRPSGVPDRFSGSTSGTSASLAITGLQAEDEADYYCQSYDTSLSASVFGGGTRLTVLSGGGGSEVQLVESGGGLVQPGGSLKLSCAASGFTFNKYAMNWVRQAPGKGLEWVARIRSKYNNYATYYADSVKDRFTISRDDSKNTAYLQMNNLKTEDTAVYYCVRHGNFGNSYISYWAYWGQGTLVTVSSGGGGSGGGGSGGGGSQTVVTQEPSLTVSPGGTVTLTCGSSTGAVTSGNYPNWVQQKPGQAPRGLIGGTKFLAPGTPARFSGSLLGGKAALTLSGVQPEDEAEYYCVLWYSNRWVFGGGTKLTVL

SEQ ID NO: 11 - protein, 5 aa, Artificial Sequence
  Synthetic peptide
SYGMH

SEQ ID NO: 12 - protein, 17 aa, Artificial Sequence
  Synthetic peptide
VIWYDGSDKYFADSVKG

SEQ ID NO: 13 - protein, 13 aa, Artificial Sequence
  Synthetic peptide
DGIAGARYVYFDY

SEQ ID NO: 14 - protein, 11 aa, Artificial Sequence
  Synthetic peptide
RASQGISNYLA

SEQ ID NO: 15 - protein, 7 aa, Artificial Sequence
  Synthetic peptide
AASSLQG

SEQ ID NO: 16 - protein, 9 aa, Artificial Sequence
  Synthetic peptide
QQYYNYPFT

SEQ ID NO: 17 - protein, 122 aa, Artificial Sequence
  Synthetic peptide
QVQLVESGGGVVQPGRSLRLSCAASGFTFSSYGMHWVRQAPGKGLEWVAVIWYDGSDKYFADSVKGRFTISRDNSKNTLYLQMNSLRAEDTAVYYCARDGIAGARYVYFDYWGQGTLVTVSS

SEQ ID NO: 18 - protein, 107 aa, Artificial Sequence
  Synthetic peptide
DIQMTQSPSSLSASVGDRVTITCRASQGISNYLAWFQQKPGKAPKSLIYAASSLQGGVPSKFSGSGSGTDFTLTISSLQPEDFATYYCQQYYNYPFTFGPGTTVDIK

SEQ ID NO: 19 - protein, 244 aa, Artificial Sequence
  Synthetic peptide
QVQLVESGGGVVQPGRSLRLSCAASGFTFSSYGMHWVRQAPGKGLEWVAVIWYDGSDKYFADSVKGRFTISRDNSKNTLYLQMNSLRAEDTAVYYCARDGIAGARYVYFDYWGQGTLVTVSSGGGGSGGGGSGGGGSDIQMTQSPSSLSASVGDRVTITCRASQGISNYLAWFQQKPGKAPKSLIYAASSLQGGVPSKFSGSGSGTDFTLTISSLQPEDFATYYCQQYYNYPFTFGPGTTVDIK

SEQ ID NO: 20 - protein, 499 aa, Artificial Sequence
  Synthetic peptide
QVQLVESGGGVVQPGRSLRLSCAASGFTFSSYGMHWVRQAPGKGLEWVAVIWYDGSDKYFADSVKGRFTISRDNSKNTLYLQMNSLRAEDTAVYYCARDGIAGARYVYFDYWGQGTLVTVSSGGGGSGGGGSGGGGSDIQMTQSPSSLSASVGDRVTITCRASQGISNYLAWFQQKPGKAPKSLIYAASSLQGGVPSKFSGSGSGTDFTLTISSLQPEDFATYYCQQYYNYPFTFGPGTTVDIKSGGGGSEVQLVESGGGLVQPGGSLKLSCAASGFTFNKYAMNWVRQAPGKGLEWVARIRSKYNNYATYYADSVKDRFTISRDDSKNTAYLQMNNLKTEDTAVYYCVRHGNFGNSYISYWAYWGQGTLVTVSSGGGGSGGGGSGGGGSQTVVTQEPSLTVSPGGTVTLTCGSSTGAVTSGNYPNWVQQKPGQAPRGLIGGTKFLAPGTPARFSGSLLGGKAALTLSGVQPEDEAEYYCVLWYSNRWVFGGGTKLTVL

SEQ ID NO: 21 - protein, 5 aa, Artificial Sequence
  Synthetic peptide
SYGMH

SEQ ID NO: 22 - protein, 17 aa, Artificial Sequence
  Synthetic peptide
VTWYDGSNKYYGDSVKG

SEQ ID NO: 23 - protein, 13 aa, Artificial Sequence
  Synthetic peptide
DLLRGVKGYAMDV

SEQ ID NO: 24 - protein, 12 aa, Artificial Sequence
  Synthetic peptide
RASQSLRRIYLA

SEQ ID NO: 25 - protein, 7 aa, Artificial Sequence
  Synthetic peptide
DVFDRAT

SEQ ID NO: 26 - protein, 9 aa, Artificial Sequence
  Synthetic peptide
QQYSDSPFT

SEQ ID NO: 27 - protein, 122 aa, Artificial Sequence
  Synthetic peptide
QEQLVESGGGVVQPGRSLRLSCAASGFTFSSYGMHWVRQAPGKGLEWVAVTWYDGSNKYYGDSVKGRFTISRDNSKNTLYLQMNSLRAEDTAVYYCARDLLRGVKGYAMDVWGQGTTVTVSS

SEQ ID NO: 28 - protein, 108 aa, Artificial Sequence
  Synthetic peptide
EIVLTQSPGTLSLSPGERATLSCRASQSLRRIYLAWYQQKPGQAPRLLIYDVFDRATGIPDRFSGGGSGTDFTLTISRLEPEDFAVYYCQQYSDSPFTFGPGTKVDIK

SEQ ID NO: 29 - protein, 245 aa, Artificial Sequence
  Synthetic peptide
QEQLVESGGGVVQPGRSLRLSCAASGFTFSSYGMHWVRQAPGKGLEWVAVTWYDGSNKYYGDSVKGRFTISRDNSKNTLYLQMNSLRAEDTAVYYCARDLLRGVKGYAMDVWGQGTTVTVSSGGGGSGGGGSGGGGSEIVLTQSPGTLSLSPGERATLSCRASQSLRRIYLAWYQQKPGQAPRLLIYDVFDRATGIPDRFSGGGSGTDFTLTISRLEPEDFAVYYCQQYSDSPFTFGPGTKVDIK

SEQ ID NO: 30 - protein, 500 aa, Artificial Sequence
  Synthetic peptide
QEQLVESGGGVVQPGRSLRLSCAASGFTFSSYGMHWVRQAPGKGLEWVAVTWYDGSNKYYGDSVKGRFTISRDNSKNTLYLQMNSLRAEDTAVYYCARDLLRGVKGYAMDVWGQGTTVTVSSGGGGSGGGGSGGGGSEIVLTQSPGTLSLSPGERATLSCRASQSLRRIYLAWYQQKPGQAPRLLIYDVFDRATGIPDRFSGGGSGTDFTLTISRLEPEDFAVYYCQQYSDSPFTFGPGTKVDIKSGGGGSEVQLVESGGGLVQPGGSLKLSCAASGFTFNKYAMNWVRQAPGKGLEWVARIRSKYNNYATYYADSVKDRFTISRDDSKNTAYLQMNNLKTEDTAVYYCVRHGNFGNSYISYWAYWGQGTLVTVSSGGGGSGGGGSGGGGSQTVVTQEPSLTVSPGGTVTLTCGSSTGAVTSGNYPNWVQQKPGQAPRGLIGGTKFLAPGTPARFSGSLLGGKAALTLSGVQPEDEAEYYCVLWYSNRWVFGGGTKLTVL

SEQ ID NO: 31 - protein, 5 aa, Artificial Sequence
  Synthetic peptide
SYGIS

SEQ ID NO: 32 - protein, 17 aa, Artificial Sequence
  Synthetic peptide
WISAYNGYTHYAQKLQG

SEQ ID NO: 33 - protein, 12 aa, Artificial Sequence
  Synthetic peptide
DYGGNDYYGMDV

SEQ ID NO: 34 - protein, 13 aa, Artificial Sequence
  Synthetic peptide
SGSSSNIGINYVY

SEQ ID NO: 35 - protein, 7 aa, Artificial Sequence
  Synthetic peptide
RSDQRPS

SEQ ID NO: 36 - protein, 11 aa, Artificial Sequence
  Synthetic peptide
AAWDDSLSGVV

SEQ ID NO: 37 - protein, 121 aa, Artificial Sequence
  Synthetic peptide
QVQLVQSGAEVKKPGASVKVSCKASGYTFTSYGISWVRQAPGQGLEWMGWISAYNGYTHYAQKLQGRVTMTTDTSTSTAYMELRSLRSDDTAVYYCARDYGGNDYYGMDVWGQGTTVTVSS

SEQ ID NO: 38 - protein, 110 aa, Artificial Sequence
  Synthetic peptide
QSVLTQPPSASGTPGQRVTISCSGSSSNIGINYVYWYQQLPGTAPKLLIYRSDQRPSGVPDRFSGSKSGTSASLALSGLRSEDEADYYCAAWDDSLSGVVFGGGTKLTVL

SEQ ID NO: 39 - protein, 246 aa, Artificial Sequence
  Synthetic peptide
QVQLVQSGAEVKKPGASVKVSCKASGYTFTSYGISWVRQAPGQGLEWMGWISAYNGYTHYAQKLQGRVTMTTDTSTSTAYMELRSLRSDDTAVYYCARDYGGNDYYGMDVWGQGTTVTVSSGGGGSGGGGSGGGGSQSVLTQPPSASGTPGQRVTISCSGSSSNIGINYVYWYQQLPGTAPKLLIYRSDQRPSGVPDRFSGSKSGTSASLALSGLRSEDEADYYCAAWDDSLSGVVFGGGTKLTVL

SEQ ID NO: 40 - protein, 501 aa, Artificial Sequence
  Synthetic peptide
QVQLVQSGAEVKKPGASVKVSCKASGYTFTSYGISWVRQAPGQGLEWMGWISAYNGYTHYAQKLQGRVTMTTDTSTSTAYMELRSLRSDDTAVYYCARDYGGNDYYGMDVWGQGTTVTVSSGGGGSGGGGSGGGGSQSVLTQPPSASGTPGQRVTISCSGSSSNIGINYVYWYQQLPGTAPKLLIYRSDQRPSGVPDRFSGSKSGTSASLALSGLRSEDEADYYCAAWDDSLSGVVFGGGTKLTVLSGGGGSEVQLVESGGGLVQPGGSLKLSCAASGFTFNKYAMNWVRQAPGKGLEWVARIRSKYNNYATYYADSVKDRFTISRDDSKNTAYLQMNNLKTEDTAVYYCVRHGNFGNSYISYWAYWGQGTLVTVSSGGGGSGGGGSGGGGSQTVVTQEPSLTVSPGGTVTLTCGSSTGAVTSGNYPNWVQQKPGQAPRGLIGGTKFLAPGTPARFSGSLLGGKAALTLSGVQPEDEAEYYCVLWYSNRWVFGGGTKLTVL

SEQ ID NO: 41 - protein, 7 aa, Artificial Sequence
  Synthetic peptide
SGGYYWS

SEQ ID NO: 42 - protein, 16 aa, Artificial Sequence
  Synthetic peptide
YIFYSGSTDYNPSLKS

SEQ ID NO: 43 - protein, 10 aa, Artificial Sequence
  Synthetic peptide
SGYSYALFDH

SEQ ID NO: 44 - protein, 11 aa, Artificial Sequence
  Synthetic peptide
RASQFIGRYFN

SEQ ID NO: 45 - protein, 7 aa, Artificial Sequence
  Synthetic peptide
AESSLQS

SEQ ID NO: 46 - protein, 9 aa, Artificial Sequence
  Synthetic peptide
QQSYSTPWT

SEQ ID NO: 47 - protein, 120 aa, Artificial Sequence
  Synthetic peptide
QVQLQESGPGLVKPSQTLSLTCTVSGDSIISGGYYWSWIRQHPGKGLEWIGYIFYSGSTDYNPSLKSRVTISVDTSKNQFSLKLSSVTAADTAVYYCARSGYSYALFDHWGQGTLVTVSS

SEQ ID NO: 48 - protein, 107 aa, Artificial Sequence
  Synthetic peptide
DIQMTQSPSSLSASVGDRVTISCRASQFIGRYFNWYQQQPGKAPKVLIYAESSLQSGVPSRFSGSGSGTEFTLTISSLQPEDFARYYCQQSYSTPWTFGQGTKVEIK

SEQ ID NO: 49 - protein, 242 aa, Artificial Sequence
  Synthetic peptide
QVQLQESGPGLVKPSQTLSLTCTVSGDSIISGGYYWSWIRQHPGKGLEWIGYIFYSGSTDYNPSLKSRVTISVDTSKNQFSLKLSSVTAADTAVYYCARSGYSYALFDHWGQGTLVTVSSGGGGSGGGGSGGGGSDIQMTQSPSSLSASVGDRVTISCRASQFIGRYFNWYQQQPGKAPKVLIYAESSLQSGVPSRFSGSGSGTEFTLTISSLQPEDFARYYCQQSYSTPWTFGQGTKVEIK

SEQ ID NO: 50 - protein, 497 aa, Artificial Sequence
  Synthetic peptide
QVQLQESGPGLVKPSQTLSLTCTVSGDSIISGGYYWSWIRQHPGKGLEWIGYIFYSGSTDYNPSLKSRVTISVDTSKNQFSLKLSSVTAADTAVYYCARSGYSYALFDHWGQGTLVTVSSGGGGSGGGGSGGGGSDIQMTQSPSSLSASVGDRVTISCRASQFIGRYFNWYQQQPGKAPKVLIYAESSLQSGVPSRFSGSGSGTEFTLTISSLQPEDFARYYCQQSYSTPWTFGQGTKVEIKSGGGGSEVQLVESGGGLVQPGGSLKLSCAASGFTFNKYAMNWVRQAPGKGLEWVARIRSKYNNYATYYADSVKDRFTISRDDSKNTAYLQMNNLKTEDTAVYYCVRHGNFGNSYISYWAYWGQGTLVTVSSGGGGSGGGGSGGGGSQTVVTQEPSLTVSPGGTVTLTCGSSTGAVTSGNYPNWVQQKPGQAPRGLIGGTKFLAPGTPARFSGSLLGGKAALTLSGVQPEDEAEYYCVLWYSNRWVFGGGTKLTVL

SEQ ID NO: 51 - protein, 7 aa, Artificial Sequence
  Synthetic peptide
SGGYYWS

SEQ ID NO: 52 - protein, 16 aa, Artificial Sequence
  Synthetic peptide
YIFYSGSTDYNPSLKS

SEQ ID NO: 53 - protein, 10 aa, Artificial Sequence
  Synthetic peptide
SGYSYALFDH

SEQ ID NO: 54 - protein, 11 aa, Artificial Sequence
  Synthetic peptide
RASQFIGRYFN

SEQ ID NO: 55 - protein, 7 aa, Artificial Sequence
  Synthetic peptide
AESSLQS

SEQ ID NO: 56 - protein, 9 aa, Artificial Sequence
  Synthetic peptide
QQSYSTPFT

SEQ ID NO: 57 - protein, 120 aa, Artificial Sequence
  Synthetic peptide
QVQLQESGPGLVKPSQTLSLTCTVSGDSIISGGYYWSWIRQHPGKCLEWIGYIFYSGSTDYNPSLKSRVTISVDTSKNQFSLKLSSVTAADTAVYYCARSGYSYALFDHWGQGTLVTVSS

SEQ ID NO: 58 - protein, 107 aa, Artificial Sequence
  Synthetic peptide
DIQMTQSPSSLSASVGDRVTISCRASQFIGRYFNWYQQQPGKAPKVLIYAESSLQSGVPSRFSGSGSGTEFTLTISSLQPEDFARYYCQQSYSTPFTFGCGTKVEIK

SEQ ID NO: 59 - protein, 242 aa, Artificial Sequence
  Synthetic peptide
QVQLQESGPGLVKPSQTLSLTCTVSGDSIISGGYYWSWIRQHPGKCLEWIGYIFYSGSTDYNPSLKSRVTISVDTSKNQFSLKLSSVTAADTAVYYCARSGYSYALFDHWGQGTLVTVSSGGGGSGGGGSGGGGSDIQMTQSPSSLSASVGDRVTISCRASQFIGRYFNWYQQQPGKAPKVLIYAESSLQSGVPSRFSGSGSGTEFTLTISSLQPEDFARYYCQQSYSTPFTFGCGTKVEIK

SEQ ID NO: 60 - protein, 497 aa, Artificial Sequence
  Synthetic peptide
QVQLQESGPGLVKPSQTLSLTCTVSGDSIISGGYYWSWIRQHPGKCLEWIGYIFYSGSTDYNPSLKSRVTISVDTSKNQFSLKLSSVTAADTAVYYCARSGYSYALFDHWGQGTLVTVSSGGGGSGGGGSGGGGSDIQMTQSPSSLSASVGDRVTISCRASQFIGRYFNWYQQQPGKAPKVLIYAESSLQSGVPSRFSGSGSGTEFTLTISSLQPEDFARYYCQQSYSTPFTFGCGTKVEIKSGGGGSEVQLVESGGGLVQPGGSLKLSCAASGFTFNKYAMNWVRQAPGKGLEWVARIRSKYNNYATYYADSVKDRFTISRDDSKNTAYLQMNNLKTEDTAVYYCVRHGNFGNSYISYWAYWGQGTLVTVSSGGGGSGGGGSGGGGSQTVVTQEPSLTVSPGGTVTLTCGSSTGAVTSGNYPNWVQQKPGQAPRGLIGGTKFLAPGTPARFSGSLLGGKAALTLSGVQPEDEAEYYCVLWYSNRWVFGGGTKLTVL

SEQ ID NO: 61 - protein, 5 aa, Artificial Sequence
  Synthetic peptide
SYYLH

SEQ ID NO: 62 - protein, 17 aa, Artificial Sequence
  Synthetic peptide
IVDPSGGSTSYDQKFQG

SEQ ID NO: 63 - protein, 9 aa, Artificial Sequence
  Synthetic peptide
DYGDYVFDY

SEQ ID NO: 64 - protein, 13 aa, Artificial Sequence
  Synthetic peptide
SGSSSNIGTNTVN

SEQ ID NO: 65 - protein, 7 aa, Artificial Sequence
  Synthetic peptide
INNQRPS

SEQ ID NO: 66 - protein, 11 aa, Artificial Sequence
  Synthetic peptide
ATWDDSLNGPV

SEQ ID NO: 67 - protein, 118 aa, Artificial Sequence
  Synthetic peptide
QVHLVQSGAEVKKPGASVRVSCKASGYTFTSYYLHWVRQAPGQCLEWMGIVDPSGGSTSYDQKFQGRFTMTRDTSTSTVYMELSSLRSEDTAVYYCARDYGDYVFDYWGQGTLVTVSS

SEQ ID NO: 68 - protein, 110 aa, Artificial Sequence
  Synthetic peptide
QSVLTQPPSASGTPGQRVTISCSGSSSNIGTNTVNWYQQLPGTAPQLLIYINNQRPSGVPDRFSGSKSGTSASLAISGLQSEDEADYYCATWDDSLNGPVVGCGTKLTVL

SEQ ID NO: 69 - protein, 243 aa, Artificial Sequence
  Synthetic peptide
QVHLVQSGAEVKKPGASVRVSCKASGYTFTSYYLHWVRQAPGQCLEWMGIVDPSGGSTSYDQKFQGRFTMTRDTSTSTVYMELSSLRSEDTAVYYCARDYGDYVFDYWGQGTLVTVSSGGGGSGGGGSGGGGSQSVLTQPPSASGTPGQRVTISCSGSSSNIGTNTVNWYQQLPGTAPQLLIYINNQRPSGVPDRFSGSKSGTSASLAISGLQSEDEADYYCATWDDSLNGPVVGCGTKLTVL

SEQ ID NO: 70 - protein, 498 aa, Artificial Sequence
  Synthetic peptide
QVHLVQSGAEVKKPGASVRVSCKASGYTFTSYYLHWVRQAPGQCLEWMGIVDPSGGSTSYDQKFQGRFTMTRDTSTSTVYMELSSLRSEDTAVYYCARDYGDYVFDYWGQGTLVTVSSGGGGSGGGGSGGGGSQSVLTQPPSASGTPGQRVTISCSGSSSNIGTNTVNWYQQLPGTAPQLLIYINNQRPSGVPDRFSGSKSGTSASLAISGLQSEDEADYYCATWDDSLNGPVVGCGTKLTVLSGGGGSEVQLVESGGGLVQPGGSLKLSCAASGFTFNKYAMNWVRQAPGKGLEWVARIRSKYNNYATYYADSVKDRFTISRDDSKNTAYLQMNNLKTEDTAVYYCVRHGNFGNSYISYWAYWGQGTLVTVSSGGGGSGGGGSGGGGSQTVVTQEPSLTVSPGGTVTLTCGSSTGAVTSGNYPNWVQQKPGQAPRGLIGGTKFLAPGTPARFSGSLLGGKAALTLSGVQPEDEAEYYCVLWYSNRWVFGGGTKLTVL

SEQ ID NO: 71 - protein, 5 aa, Artificial Sequence
  Synthetic peptide
SYGMH

SEQ ID NO: 72 - protein, 17 aa, Artificial Sequence
  Synthetic peptide
VIWYDGSDKYFADSVKG

SEQ ID NO: 73 - protein, 13 aa, Artificial Sequence
  Synthetic peptide
DGIAGARYVYFDY

SEQ ID NO: 74 - protein, 11 aa, Artificial Sequence
  Synthetic peptide
RASQGISNYLA

SEQ ID NO: 75 - protein, 7 aa, Artificial Sequence
  Synthetic peptide
AASSLQG

SEQ ID NO: 76 - protein, 9 aa, Artificial Sequence
  Synthetic peptide
QQYYNYPFT

SEQ ID NO: 77 - protein, 122 aa, Artificial Sequence
  Synthetic peptide
QVQLVESGGGVVQPGRSLRLSCAASGFTFSSYGMHWVRQAPGKCLEWVAVIWYDGSDKYFADSVKGRFTISRDNSKNTLYLQMNSLRAEDTAVYYCARDGIAGARYVYFDYWGQGTLVTVSS

SEQ ID NO: 78 - protein, 107 aa, Artificial Sequence
  Synthetic peptide
DIQMTQSPSSLSASVGDRVTITCRASQGISNYLAWFQQKPGKAPKSLIYAASSLQGGVPSKFSGSGSGTDFTLTISSLQPEDFATYYCQQYYNYPFTFGCGTTVDIK

SEQ ID NO: 79 - protein, 244 aa, Artificial Sequence
  Synthetic peptide
QVQLVESGGGVVQPGRSLRLSCAASGFTFSSYGMHWVRQAPGKCLEWVAVIWYDGSDKYFADSVKGRFTISRDNSKNTLYLQMNSLRAEDTAVYYCARDGIAGARYVYFDYWGQGTLVTVSSGGGGSGGGGSGGGGSDIQMTQSPSSLSASVGDRVTITCRASQGISNYLAWFQQKPGKAPKSLIYAASSLQGGVPSKFSGSGSGTDFTLTISSLQPEDFATYYCQQYYNYPFTFGCGTTVDIK

SEQ ID NO: 80 - protein, 499 aa, Artificial Sequence
  Synthetic peptide
QVQLVESGGGVVQPGRSLRLSCAASGFTFSSYGMHWVRQAPGKCLEWVAVIWYDGSDKYFADSVKGRFTISRDNSKNTLYLQMNSLRAEDTAVYYCARDGIAGARYVYFDYWGQGTLVTVSSGGGGSGGGGSGGGGSDIQMTQSPSSLSASVGDRVTITCRASQGISNYLAWFQQKPGKAPKSLIYAASSLQGGVPSKFSGSGSGTDFTLTISSLQPEDFATYYCQQYYNYPFTFGCGTTVDIKSGGGGSEVQLVESGGGLVQPGGSLKLSCAASGFTFNKYAMNWVRQAPGKGLEWVARIRSKYNNYATYYADSVKDRFTISRDDSKNTAYLQMNNLKTEDTAVYYCVRHGNFGNSYISYWAYWGQGTLVTVSSGGGGSGGGGSGGGGSQTVVTQEPSLTVSPGGTVTLTCGSSTGAVTSGNYPNWVQQKPGQAPRGLIGGTKFLAPGTPARFSGSLLGGKAALTLSGVQPEDEAEYYCVLWYSNRWVFGGGTKLTVL

SEQ ID NO: 81 - protein, 5 aa, Artificial Sequence
  Synthetic peptide
SYGIS

SEQ ID NO: 82 - protein, 17 aa, Artificial Sequence
  Synthetic peptide
WISAYNGYTHYAQKLQG

SEQ ID NO: 83 - protein, 12 aa, Artificial Sequence
  Synthetic peptide
DYGGNDYYGMDV

SEQ ID NO: 84 - protein, 13 aa, Artificial Sequence
  Synthetic peptide
SGSSSNIGINYVY

SEQ ID NO: 85 - protein, 7 aa, Artificial Sequence
  Synthetic peptide
RSDQRPS

SEQ ID NO: 86 - protein, 11 aa, Artificial Sequence
  Synthetic peptide
AAWDDSLSGVV

SEQ ID NO: 87 - protein, 121 aa, Artificial Sequence
  Synthetic peptide
QVQLVQSGAEVKKPGASVKVSCKASGYTFTSYGISWVRQAPGQCLEWMGWISAYNGYTHYAQKLQGRVTMTTDTSTSTAYMELRSLRSDDTAVYYCARDYGGNDYYGMDVWGQGTTVTVSS

SEQ ID NO: 88 - protein, 110 aa, Artificial Sequence
  Synthetic peptide
QSVLTQPPSASGTPGQRVTISCSGSSSNIGINYVYWYQQLPGTAPKLLIYRSDQRPSGVPDRFSGSKSGTSASLALSGLRSEDEADYYCAAWDDSLSGVVFGCGTKLTVL

SEQ ID NO: 89 - protein, 246 aa, Artificial Sequence
  Synthetic peptide
QVQLVQSGAEVKKPGASVKVSCKASGYTFTSYGISWVRQAPGQCLEWMGWISAYNGYTHYAQKLQGRVTMTTDTSTSTAYMELRSLRSDDTAVYYCARDYGGNDYYGMDVWGQGTTVTVSSGGGGSGGGGSGGGGSQSVLTQPPSASGTPGQRVTISCSGSSSNIGINYVYWYQQLPGTAPKLLIYRSDQRPSGVPDRFSGSKSGTSASLALSGLRSEDEADYYCAAWDDSLSGVVFGCGTKLTVL

SEQ ID NO: 90 - protein, 501 aa, Artificial Sequence
  Synthetic peptide
QVQLVQSGAEVKKPGASVKVSCKASGYTFTSYGISWVRQAPGQCLEWMGWISAYNGYTHYAQKLQGRVTMTTDTSTSTAYMELRSLRSDDTAVYYCARDYGGNDYYGMDVWGQGTTVTVSSGGGGSGGGGSGGGGSQSVLTQPPSASGTPGQRVTISCSGSSSNIGINYVYWYQQLPGTAPKLLIYRSDQRPSGVPDRFSGSKSGTSASLALSGLRSEDEADYYCAAWDDSLSGVVFGCGTKLTVLSGGGGSEVQLVESGGGLVQPGGSLKLSCAASGFTFNKYAMNWVRQAPGKGLEWVARIRSKYNNYATYYADSVKDRFTISRDDSKNTAYLQMNNLKTEDTAVYYCVRHGNFGNSYISYWAYWGQGTLVTVSSGGGGSGGGGSGGGGSQTVVTQEPSLTVSPGGTVTLTCGSSTGAVTSGNYPNWVQQKPGQAPRGLIGGTKFLAPGTPARFSGSLLGGKAALTLSGVQPEDEAEYYCVLWYSNRWVFGGGTKLTVL

SEQ ID NO: 91 - protein, 7 aa, Artificial Sequence
  Synthetic peptide
SGGYYWS

SEQ ID NO: 92 - protein, 16 aa, Artificial Sequence
  Synthetic peptide
YIFYSGSTDYNPSLKS

SEQ ID NO: 93 - protein, 10 aa, Artificial Sequence
  Synthetic peptide
SGYSYALFDH

SEQ ID NO: 94 - protein, 11 aa, Artificial Sequence
  Synthetic peptide
RASQFIGRYFN

SEQ ID NO: 95 - protein, 7 aa, Artificial Sequence
  Synthetic peptide
AESSLQS

SEQ ID NO: 96 - protein, 9 aa, Artificial Sequence
  Synthetic peptide
QQSYSTPWT

SEQ ID NO: 97 - protein, 120 aa, Artificial Sequence; identical to SEQ ID NO: 57
  Synthetic peptide

SEQ ID NO: 98 - protein, 107 aa, Artificial Sequence
  Synthetic peptide
DIQMTQSPSSLSASVGDRVTISCRASQFIGRYFNWYQQQPGKAPKVLIYAESSLQSGVPSRFSGSGSGTEFTLTISSLQPEDFARYYCQQSYSTPWTFGCGTKVEIK

SEQ ID NO: 99 - protein, 242 aa, Artificial Sequence
  Synthetic peptide
QVQLQESGPGLVKPSQTLSLTCTVSGDSIISGGYYWSWIRQHPGKCLEWIGYIFYSGSTDYNPSLKSRVTISVDTSKNQFSLKLSSVTAADTAVYYCARSGYSYALFDHWGQGTLVTVSSGGGGSGGGGSGGGGSDIQMTQSPSSLSASVGDRVTISCRASQFIGRYFNWYQQQPGKAPKVLIYAESSLQSGVPSRFSGSGSGTEFTLTISSLQPEDFARYYCQQSYSTPWTFGCGTKVEIK

SEQ ID NO: 100 - protein, 497 aa, Artificial Sequence
  Synthetic peptide
QVQLQESGPGLVKPSQTLSLTCTVSGDSIISGGYYWSWIRQHPGKCLEWIGYIFYSGSTDYNPSLKSRVTISVDTSKNQFSLKLSSVTAADTAVYYCARSGYSYALFDHWGQGTLVTVSSGGGGSGGGGSGGGGSDIQMTQSPSSLSASVGDRVTISCRASQFIGRYFNWYQQQPGKAPKVLIYAESSLQSGVPSRFSGSGSGTEFTLTISSLQPEDFARYYCQQSYSTPWTFGCGTKVEIKSGGGGSEVQLVESGGGLVQPGGSLKLSCAASGFTFNKYAMNWVRQAPGKGLEWVARIRSKYNNYATYYADSVKDRFTISRDDSKNTAYLQMNNLKTEDTAVYYCVRHGNFGNSYISYWAYWGQGTLVTVSSGGGGSGGGGSGGGGSQTVVTQEPSLTVSPGGTVTLTCGSSTGAVTSGNYPNWVQQKPGQAPRGLIGGTKFLAPGTPARFSGSLLGGKAALTLSGVQPEDEAEYYCVLWYSNRWVFGGGTKLTVL

SEQ ID NO: 101 - protein, 5 aa, Artificial Sequence
  Synthetic peptide
TYGMH

SEQ ID NO: 102 - protein, 17 aa, Artificial Sequence
  Synthetic peptide
VIWYDGSNKYYGDSVKG

SEQ ID NO: 103 - protein, 11 aa, Artificial Sequence
  Synthetic peptide
DNSHYYYGMDV

SEQ ID NO: 104 - protein, 14 aa, Artificial Sequence
  Synthetic peptide
TGSSSNIGAGYDVN

SEQ ID NO: 105 - protein, 7 aa, Artificial Sequence
  Synthetic peptide
VNNNRPS

SEQ ID NO: 106 - protein, 11 aa, Artificial Sequence
  Synthetic peptide
QSYETSLSASV

SEQ ID NO: 107 - protein, 120 aa, Artificial Sequence
  Synthetic peptide
QVQLVESGGGVVQPGRSLRLSCAASGFTFSTYGMHWVRQAPGKCLEWVAVIWYDGSNKYYGDSVKGRFTISRDNSKNTLYLQMNSLRAEDTAVYYCARDNSHYYYGMDVWGQGTTVTVSS

SEQ ID NO: 108 - protein, 111 aa, Artificial Sequence
  Synthetic peptide
QSVLTQPPSVSGAPGQRVTISCTGSSSNIGAGYDVNWYQQFPGTAPKLLIYVNNNRPSGVPDRFSGSTSGTSASLAITGLQAEDEADYYCQSYETSLSASVFGCGTRLTVL

SEQ ID NO: 109 - protein, 246 aa, Artificial Sequence
  Synthetic peptide
QVQLVESGGGVVQPGRSLRLSCAASGFTFSTYGMHWVRQAPGKCLEWVAVIWYDGSNKYYGDSVKGRFTISRDNSKNTLYLQMNSLRAEDTAVYYCARDNSHYYYGMDVWGQGTTVTVSSGGGGSGGGGSGGGGSQSVLTQPPSVSGAPGQRVTISCTGSSSNIGAGYDVNWYQQFPGTAPKLLIYVNNNRPSGVPDRFSGSTSGTSASLAITGLQAEDEADYYCQSYETSLSASVFGCGTRLTVL

SEQ ID NO: 110 - protein, 501 aa, Artificial Sequence
  Synthetic peptide
QVQLVESGGGVVQPGRSLRLSCAASGFTFSTYGMHWVRQAPGKCLEWVAVIWYDGSNKYYGDSVKGRFTISRDNSKNTLYLQMNSLRAEDTAVYYCARDNSHYYYGMDVWGQGTTVTVSSGGGGSGGGGSGGGGSQSVLTQPPSVSGAPGQRVTISCTGSSSNIGAGYDVNWYQQFPGTAPKLLIYVNNNRPSGVPDRFSGSTSGTSASLAITGLQAEDEADYYCQSYETSLSASVFGCGTRLTVLSGGGGSEVQLVESGGGLVQPGGSLKLSCAASGFTFNKYAMNWVRQAPGKGLEWVARIRSKYNNYATYYADSVKDRFTISRDDSKNTAYLQMNNLKTEDTAVYYCVRHGNFGNSYISYWAYWGQGTLVTVSSGGGGSGGGGSGGGGSQTVVTQEPSLTVSPGGTVTLTCGSSTGAVTSGNYPNWVQQKPGQAPRGLIGGTKFLAPGTPARFSGSLLGGKAALTLSGVQPEDEAEYYCVLWYSNRWVFGGGTKLTVL

SEQ ID NO: 111 - protein, 5 aa, Artificial Sequence
  Synthetic peptide
YYGMH

SEQ ID NO: 112 - protein, 17 aa, Artificial Sequence
  Synthetic peptide
VIWYDGSNKYYADSVKG

SEQ ID NO: 113 - protein, 12 aa, Artificial Sequence
  Synthetic peptide
DREMGSRGDFDY

SEQ ID NO: 114 - protein, 11 aa, Artificial Sequence
  Synthetic peptide
RASQGINNYLA

SEQ ID NO: 115 - protein, 7 aa, Artificial Sequence
  Synthetic peptide
AVSILQS

SEQ ID NO: 116 - protein, 9 aa, Artificial Sequence
  Synthetic peptide
QQYNFYPFS

SEQ ID NO: 117 - protein, 121 aa, Artificial Sequence
  Synthetic peptide
QAQLVESGGGVVQPGRSLRLSCAASGFTFSYYGMHWVRQAPGKCLEWVAVIWYDGSNKYYADSVKGRFTISRDNSKNTLYLQMNSLRAEDTAVYYCARDREMGSRGDFDYWGQGTLVTVSS

SEQ ID NO: 118 - protein, 107 aa, Artificial Sequence
  Synthetic peptide
DIQMTQSPSSLSASVGDRVTITCRASQGINNYLAWFQQKPGKAPKSLIYAVSILQSGVPSKFSGSGSGTDFTLTIGNLQPEDFATYYCQQYNFYPFSFGCGTKVDIK

SEQ ID NO: 119 - protein, 243 aa, Artificial Sequence
  Synthetic peptide
QAQLVESGGGVVQPGRSLRLSCAASGFTFSYYGMHWVRQAPGKCLEWVAVIWYDGSNKYYADSVKGRFTISRDNSKNTLYLQMNSLRAEDTAVYYCARDREMGSRGDFDYWGQGTLVTVSSGGGGSGGGGSGGGGSDIQMTQSPSSLSASVGDRVTITCRASQGINNYLAWFQQKPGKAPKSLIYAVSILQSGVPSKFSGSGSGTDFTLTIGNLQPEDFATYYCQQYNFYPFSFGCGTKVDIK

SEQ ID NO: 120 - protein, 498 aa, Artificial Sequence
  Synthetic peptide
QAQLVESGGGVVQPGRSLRLSCAASGFTFSYYGMHWVRQAPGKCLEWVAVIWYDGSNKYYADSVKGRFTISRDNSKNTLYLQMNSLRAEDTAVYYCARDREMGSRGDFDYWGQGTLVTVSSGGGGSGGGGSGGGGSDIQMTQSPSSLSASVGDRVTITCRASQGINNYLAWFQQKPGKAPKSLIYAVSILQSGVPSKFSGSGSGTDFTLTIGNLQPEDFATYYCQQYNFYPFSFGCGTKVDIKSGGGGSEVQLVESGGGLVQPGGSLKLSCAASGFTFNKYAMNWVRQAPGKGLEWVARIRSKYNNYATYYADSVKDRFTISRDDSKNTAYLQMNNLKTEDTAVYYCVRHGNFGNSYISYWAYWGQGTLVTVSSGGGGSGGGGSGGGGSQTVVTQEPSLTVSPGGTVTLTCGSSTGAVTSGNYPNWVQQKPGQAPRGLIGGTKFLAPGTPARFSGSLLGGKAALTLSGVQPEDEAEYYCVLWYSNRWVFGGGTKLTVL

SEQ ID NO: 121 - protein, 5 aa, Artificial Sequence
  Synthetic peptide
SYAMS

SEQ ID NO: 122 - protein, 17 aa, Artificial Sequence
  Synthetic peptide
VISGSGGRPNYADSVKG

SEQ ID NO: 123 - protein, 11 aa, Artificial Sequence
  Synthetic peptide
VDYSNYLFFDY

SEQ ID NO: 124 - protein, 12 aa, Artificial Sequence
  Synthetic peptide
RAGQSVRSSYLG

SEQ ID NO: 125 - protein, 7 aa, Artificial Sequence
  Synthetic peptide
GASSRAT

SEQ ID NO: 126 - protein, 9 aa, Artificial Sequence
  Synthetic peptide
QQYGYSPPT

SEQ ID NO: 127 - protein, 120 aa, Artificial Sequence
  Synthetic peptide
EVQLLESGGGLVQPGGSLRLSCAASGFTFSSYAMSWVRQAPGKGLEWVSVISGSGGRPNYADSVKGRFTISRDNSKNTLYLQMNSLRDEDTAVYYCAKVDYSNYLFFDYWGQGTLVTVSS

SEQ ID NO: 128 - protein, 108 aa, Artificial Sequence
  Synthetic peptide
EIVLTQSPGTLSLSPGEGATLSCRAGQSVRSSYLGWYQQKPGQAPRLLIYGASSRATGIPDRFSGSGSGTDFTLTISRLEPEDFAVYYCQQYGYSPPTFGGGTKLEIK

SEQ ID NO: 129 - protein, 243 aa, Artificial Sequence
  Synthetic peptide
EVQLLESGGGLVQPGGSLRLSCAASGFTFSSYAMSWVRQAPGKGLEWVSVISGSGGRPNYADSVKGRFTISRDNSKNTLYLQMNSLRDEDTAVYYCAKVDYSNYLFFDYWGQGTLVTVSSGGGGSGGGGSGGGGSEIVLTQSPGTLSLSPGEGATLSCRAGQSVRSSYLGWYQQKPGQAPRLLIYGASSRATGIPDRFSGSGSGTDFTLTISRLEPEDFAVYYCQQYGYSPPTFGGGTKLEIK

SEQ ID NO: 130 - protein, 498 aa, Artificial Sequence
  Synthetic peptide
EVQLLESGGGLVQPGGSLRLSCAASGFTFSSYAMSWVRQAPGKGLEWVSVISGSGGRPNYADSVKGRFTISRDNSKNTLYLQMNSLRDEDTAVYYCAKVDYSNYLFFDYWGQGTLVTVSSGGGGSGGGGSGGGGSEIVLTQSPGTLSLSPGEGATLSCRAGQSVRSSYLGWYQQKPGQAPRLLIYGASSRATGIPDRFSGSGSGTDFTLTISRLEPEDFAVYYCQQYGYSPPTFGGGTKLEIKSGGGGSEVQLVESGGGLVQPGGSLKLSCAASGFTFNKYAMNWVRQAPGKGLEWVARIRSKYNNYATYYADSVKDRFTISRDDSKNTAYLQMNNLKTEDTAVYYCVRHGNFGNSYISYWAYWGQGTLVTVSSGGGGSGGGGSGGGGSQTVVTQEPSLTVSPGGTVTLTCGSSTGAVTSGNYPNWVQQKPGQAPRGLIGGTKFLAPGTPARFSGSLLGGKAALTLSGVQPEDEAEYYCVLWYSNRWVFGGGTKLTVL

SEQ ID NO: 131 - protein, 5 aa, Artificial Sequence
  Synthetic peptide
IYAMS

SEQ ID NO: 132 - protein, 17 aa, Artificial Sequence
  Synthetic peptide
AISGSGGSTFYADSVKG

SEQ ID NO: 133 - protein, 11 aa, Artificial Sequence
  Synthetic peptide
HDYSNYPYFDY

SEQ ID NO: 134 - protein, 12 aa, Artificial Sequence
  Synthetic peptide
RASQSVRSSYLA

SEQ ID NO: 135 - protein, 7 aa, Artificial Sequence
  Synthetic peptide
GASSRAT

SEQ ID NO: 136 - protein, 9 aa, Artificial Sequence
  Synthetic peptide
QQYGDLPFT

SEQ ID NO: 137 - protein, 120 aa, Artificial Sequence
  Synthetic peptide
EVQLLESGGGLVQPGGSLKLSCAASGFTFSIYAMSWVRQAPGKGLEWVSAISGSGGSTFYADSVKGRFTISRDNSKNTLYLQMNSLRAEDTAVYYCAKHDYSNYPYFDYWGQGTLVTVSS

SEQ ID NO: 138 - protein, 108 aa, Artificial Sequence
  Synthetic peptide
EIVLTQSPGTLSLSPGERATLSCRASQSVRSSYLAWYQQKPGQAPRLLIYGASSRATGIPDRFSGSGSGTDFTLTISRLEPEDFAVYYCQQYGDLPFTFGPGTKLEIK

SEQ ID NO: 139 - protein, 243 aa, Artificial Sequence
  Synthetic peptide
EVQLLESGGGLVQPGGSLKLSCAASGFTFSIYAMSWVRQAPGKGLEWVSAISGSGGSTFYADSVKGRFTISRDNSKNTLYLQMNSLRAEDTAVYYCAKHDYSNYPYFDYWGQGTLVTVSSGGGGSGGGGSGGGGSEIVLTQSPGTLSLSPGERATLSCRASQSVRSSYLAWYQQKPGQAPRLLIYGASSRATGIPDRFSGSGSGTDFTLTISRLEPEDFAVYYCQQYGDLPFTFGPGTKLEIK

SEQ ID NO: 140 - protein, 498 aa, Artificial Sequence
  Synthetic peptide
EVQLLESGGGLVQPGGSLKLSCAASGFTFSIYAMSWVRQAPGKGLEWVSAISGSGGSTFYADSVKGRFTISRDNSKNTLYLQMNSLRAEDTAVYYCAKHDYSNYPYFDYWGQGTLVTVSSGGGGSGGGGSGGGGSEIVLTQSPGTLSLSPGERATLSCRASQSVRSSYLAWYQQKPGQAPRLLIYGASSRATGIPDRFSGSGSGTDFTLTISRLEPEDFAVYYCQQYGDLPFTFGPGTKLEIKSGGGGSEVQLVESGGGLVQPGGSLKLSCAASGFTFNKYAMNWVRQAPGKGLEWVARIRSKYNNYATYYADSVKDRFTISRDDSKNTAYLQMNNLKTEDTAVYYCVRHGNFGNSYISYWAYWGQGTLVTVSSGGGGSGGGGSGGGGSQTVVTQEPSLTVSPGGTVTLTCGSSTGAVTSGNYPNWVQQKPGQAPRGLIGGTKFLAPGTPARFSGSLLGGKAALTLSGVQPEDEAEYYCVLWYSNRWVFGGGTKLTVL

SEQ ID NO: 141 - protein, 5 aa, Artificial Sequence
  Synthetic peptide
SYAMS

SEQ ID NO: 142 - protein, 17 aa, Artificial Sequence
  Synthetic peptide
AISGSGGRTFYADSVEG

SEQ ID NO: 143 - protein, 11 aa, Artificial Sequence
  Synthetic peptide
HDYSNYPYFDY

SEQ ID NO: 144 - protein, 12 aa, Artificial Sequence
  Synthetic peptide
RASQSVRSSYLA

SEQ ID NO: 145 - protein, 7 aa, Artificial Sequence
  Synthetic peptide
GASSRAT

SEQ ID NO: 146 - protein, 9 aa, Artificial Sequence
  Synthetic peptide
QQYGSSPFT

SEQ ID NO: 147 - protein, 120 aa, Artificial Sequence
  Synthetic peptide
EVQLLESGGGMVQPGGSLRLSCAASGFTFSSYAMSWVRQAPGKGLEWVSAISGSGGRTFYADSVEGRFTISRDNSKNTLFLQMNSLRAEDTAVYYCAKHDYSNYPYFDYWGQGTLVTVSS

SEQ ID NO: 148 - protein, 108 aa, Artificial Sequence
  Synthetic peptide
EIVLTQSPGTLSLSPGERATLSCRASQSVRSSYLAWYQQKPGQAPRLLIYGASSRATGIPDRFSGSGSGTDFTLTISRLEPEDFAVYYCQQYGSSPFTFGPGTKLEIK

SEQ ID NO: 149 - protein, 243 aa, Artificial Sequence
  Synthetic peptide
EVQLLESGGGMVQPGGSLRLSCAASGFTFSSYAMSWVRQAPGKGLEWVSAISGSGGRTFYADSVEGRFTISRDNSKNTLFLQMNSLRAEDTAVYYCAKHDYSNYPYFDYWGQGTLVTVSSGGGGSGGGGSGGGGSEIVLTQSPGTLSLSPGERATLSCRASQSVRSSYLAWYQQKPGQAPRLLIYGASSRATGIPDRFSGSGSGTDFTLTISRLEPEDFAVYYCQQYGSSPFTFGPGTKLEIK

SEQ ID NO: 150 - protein, 498 aa, Artificial Sequence
  Synthetic peptide
EVQLLESGGGMVQPGGSLRLSCAASGFTFSSYAMSWVRQAPGKGLEWVSAISGSGGRTFYADSVEGRFTISRDNSKNTLFLQMNSLRAEDTAVYYCAKHDYSNYPYFDYWGQGTLVTVSSGGGGSGGGGSGGGGSEIVLTQSPGTLSLSPGERATLSCRASQSVRSSYLAWYQQKPGQAPRLLIYGASSRATGIPDRFSGSGSGTDFTLTISRLEPEDFAVYYCQQYGSSPFTFGPGTKLEIKSGGGGSEVQLVESGGGLVQPGGSLKLSCAASGFTFNKYAMNWVRQAPGKGLEWVARIRSKYNNYATYYADSVKDRFTISRDDSKNTAYLQMNNLKTEDTAVYYCVRHGNFGNSYISYWAYWGQGTLVTVSSGGGGSGGGGSGGGGSQTVVTQEPSLTVSPGGTVTLTCGSSTGAVTSGNYPNWVQQKPGQAPRGLIGGTKFLAPGTPARFSGSLLGGKAALTLSGVQPEDEAEYYCVLWYSNRWVFGGGTKLTVL

SEQ ID NO: 151 - protein, 5 aa, Artificial Sequence
  Synthetic peptide
SYAMS

SEQ ID NO: 152 - protein, 17 aa, Artificial Sequence
  Synthetic peptide
AISGSGGRTFYADSVEG

SEQ ID NO: 153 - protein, 11 aa, Artificial Sequence
  Synthetic peptide
HDYSNYPYFDY

SEQ ID NO: 154 - protein, 12 aa, Artificial Sequence
  Synthetic peptide
RASQSIRSSYLA

SEQ ID NO: 155 - protein, 7 aa, Artificial Sequence
  Synthetic peptide
GASSRAT

SEQ ID NO: 156 - protein, 9 aa, Artificial Sequence
  Synthetic peptide
QQYGDLPFT

SEQ ID NO: 157 - protein, 120 aa, Artificial Sequence
  Synthetic peptide
EVQLLESGGGMVQPGGSLRLSCAASGFTFSSYAMSWVRQAPGKGLEWVSAISGSGGRTFYADSVEGRFTISRDNSKNTLYLQMNSLRAEDTAVYYCAKHDYSNYPYFDYWGQGTLVTVSS

SEQ ID NO: 158 - protein, 108 aa, Artificial Sequence
  Synthetic peptide
EIVLTQSPGTLSLSPGERATLSCRASQSIRSSYLAWYQQKPGQAPRLLIYGASSRATGIPDRFSGSGSGTDFTLTISRLEPEDFAVYYCQQYGDLPFTFGPGTKLEIK

SEQ ID NO: 159 - protein, 243 aa, Artificial Sequence
  Synthetic peptide
EVQLLESGGGMVQPGGSLRLSCAASGFTFSSYAMSWVRQAPGKGLEWVSAISGSGGRTFYADSVEGRFTISRDNSKNTLYLQMNSLRAEDTAVYYCAKHDYSNYPYFDYWGQGTLVTVSSGGGGSGGGGSGGGGSEIVLTQSPGTLSLSPGERATLSCRASQSIRSSYLAWYQQKPGQAPRLLIYGASSRATGIPDRFSGSGSGTDFTLTISRLEPEDFAVYYCQQYGDLPFTFGPGTKLEIK

SEQ ID NO: 160 - protein, 498 aa, Artificial Sequence
  Synthetic peptide
EVQLLESGGGMVQPGGSLRLSCAASGFTFSSYAMSWVRQAPGKGLEWVSAISGSGGRTFYADSVEGRFTISRDNSKNTLYLQMNSLRAEDTAVYYCAKHDYSNYPYFDYWGQGTLVTVSSGGGGSGGGGSGGGGSEIVLTQSPGTLSLSPGERATLSCRASQSIRSSYLAWYQQKPGQAPRLLIYGASSRATGIPDRFSGSGSGTDFTLTISRLEPEDFAVYYCQQYGDLPFTFGPGTKLEIKSGGGGSEVQLVESGGGLVQPGGSLKLSCAASGFTFNKYAMNWVRQAPGKGLEWVARIRSKYNNYATYYADSVKDRFTISRDDSKNTAYLQMNNLKTEDTAVYYCVRHGNFGNSYISYWAYWGQGTLVTVSSGGGGSGGGGSGGGGSQTVVTQEPSLTVSPGGTVTLTCGSSTGAVTSGNYPNWVQQKPGQAPRGLIGGTKFLAPGTPARFSGSLLGGKAALTLSGVQPEDEAEYYCVLWYSNRWVFGGGTKLTVL

SEQ ID NO: 161 - protein, 5 aa, Artificial Sequence
  Synthetic peptide
SYAMS

SEQ ID NO: 162 - protein, 17 aa, Artificial Sequence
  Synthetic peptide
AISGSGGRTHYADSVKG

SEQ ID NO: 163 - protein, 11 aa, Artificial Sequence
  Synthetic peptide
HDYSNYPYFDY

SEQ ID NO: 164 - protein, 12 aa, Artificial Sequence
  Synthetic peptide
RASQSVRSSYLA

SEQ ID NO: 165 - protein, 7 aa, Artificial Sequence
  Synthetic peptide
GASSRAT

SEQ ID NO: 166 - protein, 9 aa, Artificial Sequence
  Synthetic peptide
QQYGSSPFT

SEQ ID NO: 167 - protein, 120 aa, Artificial Sequence
  Synthetic peptide
EVQLLESGGGLVQSGGSLRLSCAASGFTFSSYAMSWVRQAPGKGLEWVSAISGSGGRTHYADSVKGRFTISRDNSKNTLYLQMNSLRAEDTAVYYCAKHDYSNYPYFDYWGQGTLVTVSS

SEQ ID NO: 168 - protein, 108 aa, Artificial Sequence; identical to SEQ ID NO: 148
  Synthetic peptide

SEQ ID NO: 169 - protein, 243 aa, Artificial Sequence
  Synthetic peptide
EVQLLESGGGLVQSGGSLRLSCAASGFTFSSYAMSWVRQAPGKGLEWVSAISGSGGRTHYADSVKGRFTISRDNSKNTLYLQMNSLRAEDTAVYYCAKHDYSNYPYFDYWGQGTLVTVSSGGGGSGGGGSGGGGSEIVLTQSPGTLSLSPGERATLSCRASQSVRSSYLAWYQQKPGQAPRLLIYGASSRATGIPDRFSGSGSGTDFTLTISRLEPEDFAVYYCQQYGSSPFTFGPGTKLEIK

SEQ ID NO: 170 - protein, 498 aa, Artificial Sequence
  Synthetic peptide
EVQLLESGGGLVQSGGSLRLSCAASGFTFSSYAMSWVRQAPGKGLEWVSAISGSGGRTHYADSVKGRFTISRDNSKNTLYLQMNSLRAEDTAVYYCAKHDYSNYPYFDYWGQGTLVTVSSGGGGSGGGGSGGGGSEIVLTQSPGTLSLSPGERATLSCRASQSVRSSYLAWYQQKPGQAPRLLIYGASSRATGIPDRFSGSGSGTDFTLTISRLEPEDFAVYYCQQYGSSPFTFGPGTKLEIKSGGGGSEVQLVESGGGLVQPGGSLKLSCAASGFTFNKYAMNWVRQAPGKGLEWVARIRSKYNNYATYYADSVKDRFTISRDDSKNTAYLQMNNLKTEDTAVYYCVRHGNFGNSYISYWAYWGQGTLVTVSSGGGGSGGGGSGGGGSQTVVTQEPSLTVSPGGTVTLTCGSSTGAVTSGNYPNWVQQKPGQAPRGLIGGTKFLAPGTPARFSGSLLGGKAALTLSGVQPEDEAEYYCVLWYSNRWVFGGGTKLTVL

SEQ ID NO: 171 - protein, 5 aa, Artificial Sequence
  Synthetic peptide
SYAMS

SEQ ID NO: 172 - protein, 17 aa, Artificial Sequence
  Synthetic peptide
LISGSGGRTHYADSVKG

SEQ ID NO: 173 - protein, 11 aa, Artificial Sequence
  Synthetic peptide
HDYSNYPYFDY

SEQ ID NO: 174 - protein, 12 aa, Artificial Sequence
  Synthetic peptide
RASQSVRSTYLA

SEQ ID NO: 175 - protein, 7 aa, Artificial Sequence
  Synthetic peptide
DASSRAT

SEQ ID NO: 176 - protein, 9 aa, Artificial Sequence
  Synthetic peptide
QQYGSSPPT

SEQ ID NO: 177 - protein, 120 aa, Artificial Sequence
  Synthetic peptide
EVQLLESGGGLVQPGGSLRLSCAASGFTFSSYAMSWVRQAPGKGLEWVSLISGSGGRTHYADSVKGRFTISRDNSKNTLYLQMNSLRAEDTAVYYCAKHDYSNYPYFDYWGQGTLVTVSS

SEQ ID NO: 178 - protein, 108 aa, Artificial Sequence
  Synthetic peptide
EIVLTQSPGTLSLSPGERATLSCRASQSVRSTYLAWYQQKPGQAPRLLIYDASSRATGIPDRFSGSGSGTDFTLTISRLEPEDFAVYFCQQYGSSPPTFGGGTKLEIK

SEQ ID NO: 179 - protein, 243 aa, Artificial Sequence
  Synthetic peptide
EVQLLESGGGLVQPGGSLRLSCAASGFTFSSYAMSWVRQAPGKGLEWVSLISGSGGRTHYADSVKGRFTISRDNSKNTLYLQMNSLRAEDTAVYYCAKHDYSNYPYFDYWGQGTLVTVSSGGGGSGGGGSGGGGSEIVLTQSPGTLSLSPGERATLSCRASQSVRSTYLAWYQQKPGQAPRLLIYDASSRATGIPDRFSGSGSGTDFTLTISRLEPEDFAVYFCQQYGSSPPTFGGGTKLEIK

SEQ ID NO: 180 - protein, 498 aa, Artificial Sequence
  Synthetic peptide
EVQLLESGGGLVQPGGSLRLSCAASGFTFSSYAMSWVRQAPGKGLEWVSLISGSGGRTHYADSVKGRFTISRDNSKNTLYLQMNSLRAEDTAVYYCAKHDYSNYPYFDYWGQGTLVTVSSGGGGSGGGGSGGGGSEIVLTQSPGTLSLSPGERATLSCRASQSVRSTYLAWYQQKPGQAPRLLIYDASSRATGIPDRFSGSGSGTDFTLTISRLEPEDFAVYFCQQYGSSPPTFGGGTKLEIKSGGGGSEVQLVESGGGLVQPGGSLKLSCAASGFTFNKYAMNWVRQAPGKGLEWVARIRSKYNNYATYYADSVKDRFTISRDDSKNTAYLQMNNLKTEDTAVYYCVRHGNFGNSYISYWAYWGQGTLVTVSSGGGGSGGGGSGGGGSQTVVTQEPSLTVSPGGTVTLTCGSSTGAVTSGNYPNWVQQKPGQAPRGLIGGTKFLAPGTPARFSGSLLGGKAALTLSGVQPEDEAEYYCVLWYSNRWVFGGGTKLTVL

SEQ ID NO: 181 - protein, 5 aa, Artificial Sequence
  Synthetic peptide
TYAMS

SEQ ID NO: 182 - protein, 17 aa, Artificial Sequence
  Synthetic peptide
AISGSGGSTFYADSVKG

SEQ ID NO: 183 - protein, 11 aa, Artificial Sequence
  Synthetic peptide
HDYSNYPYFDY

SEQ ID NO: 184 - protein, 12 aa, Artificial Sequence
  Synthetic peptide
RASQSVRSSYLA

SEQ ID NO: 185 - protein, 7 aa, Artificial Sequence
  Synthetic peptide
GASSRAT

SEQ ID NO: 186 - protein, 9 aa, Artificial Sequence
  Synthetic peptide
QQYGDLPFT

SEQ ID NO: 187 - protein, 120 aa, Artificial Sequence
  Synthetic peptide
EVQLLESGGGLVQPGGSLRLSCAASGFTFSTYAMSWVRQAPGKGLEWVSAISGSGGSTFYADSVKGRFTISRDNSKNTLSLQMNSLRAEDTAVYYCAKHDYSNYPYFDYWGQGTLVTVSS

SEQ ID NO: 188 - protein, 108 aa, Artificial Sequence; identical to SEQ ID NO: 138
  Synthetic peptide

SEQ ID NO: 189 - protein, 243 aa, Artificial Sequence
  Synthetic peptide
EVQLLESGGGLVQPGGSLRLSCAASGFTFSTYAMSWVRQAPGKGLEWVSAISGSGGSTFYADSVKGRFTISRDNSKNTLSLQMNSLRAEDTAVYYCAKHDYSNYPYFDYWGQGTLVTVSSGGGGSGGGGSGGGGSEIVLTQSPGTLSLSPGERATLSCRASQSVRSSYLAWYQQKPGQAPRLLIYGASSRATGIPDRFSGSGSGTDFTLTISRLEPEDFAVYYCQQYGDLPFTFGPGTKLEIK

SEQ ID NO: 190 - protein, 498 aa, Artificial Sequence
  Synthetic peptide
EVQLLESGGGLVQPGGSLRLSCAASGFTFSTYAMSWVRQAPGKGLEWVSAISGSGGSTFYADSVKGRFTISRDNSKNTLSLQMNSLRAEDTAVYYCAKHDYSNYPYFDYWGQGTLVTVSSGGGGSGGGGSGGGGSEIVLTQSPGTLSLSPGERATLSCRASQSVRSSYLAWYQQKPGQAPRLLIYGASSRATGIPDRFSGSGSGTDFTLTISRLEPEDFAVYYCQQYGDLPFTFGPGTKLEIKSGGGGSEVQLVESGGGLVQPGGSLKLSCAASGFTFNKYAMNWVRQAPGKGLEWVARIRSKYNNYATYYADSVKDRFTISRDDSKNTAYLQMNNLKTEDTAVYYCVRHGNFGNSYISYWAYWGQGTLVTVSSGGGGSGGGGSGGGGSQTVVTQEPSLTVSPGGTVTLTCGSSTGAVTSGNYPNWVQQKPGQAPRGLIGGTKFLAPGTPARFSGSLLGGKAALTLSGVQPEDEAEYYCVLWYSNRWVFGGGTKLTVL

SEQ ID NO: 191 - protein, 5 aa, Artificial Sequence
  Synthetic peptide
TYAMS

SEQ ID NO: 192 - protein, 17 aa, Artificial Sequence
  Synthetic peptide
LISGSGGRTYYADSVKG

SEQ ID NO: 193 - protein, 11 aa, Artificial Sequence
  Synthetic peptide
HDYSNYPYFDY

SEQ ID NO: 194 - protein, 12 aa, Artificial Sequence
  Synthetic peptide
RASQGVRSDYLA

SEQ ID NO: 195 - protein, 7 aa, Artificial Sequence
  Synthetic peptide
GASSRAT

SEQ ID NO: 196 - protein, 9 aa, Artificial Sequence
  Synthetic peptide
QQYGSTPPT

SEQ ID NO: 197 - protein, 120 aa, Artificial Sequence
  Synthetic peptide
EVQLLESGGGLVQPGGSLRLSCAASGFTFSTYAMSWVRQAPGKGLEWVSLISGSGGRTYYADSVKGRFTISRDNSKNTLYLQMNSLRAEDTAVYYCAKHDYSNYPYFDYWGQGTLVTVSS

SEQ ID NO: 198 - protein, 108 aa, Artificial Sequence
  Synthetic peptide
EIVLTQSPGTLSLSPGERATLSCRASQGVRSDYLAWYQQKPGQALRLLIYGASSRATGIPDRFSGSGSGTDFTLTISRLEPEDFAVYHCQQYGSTPPTFGGGTKLEIK

SEQ ID NO: 199 - protein, 243 aa, Artificial Sequence
  Synthetic peptide
EVQLLESGGGLVQPGGSLRLSCAASGFTFSTYAMSWVRQAPGKGLEWVSLISGSGGRTYYADSVKGRFTISRDNSKNTLYLQMNSLRAEDTAVYYCAKHDYSNYPYFDYWGQGTLVTVSSGGGGSGGGGSGGGGSEIVLTQSPGTLSLSPGERATLSCRASQGVRSDYLAWYQQKPGQALRLLIYGASSRATGIPDRFSGSGSGTDFTLTISRLEPEDFAVYHCQQYGSTPPTFGGGTKLEIK

SEQ ID NO: 200 - protein, 498 aa, Artificial Sequence
  Synthetic peptide
EVQLLESGGGLVQPGGSLRLSCAASGFTFSTYAMSWVRQAPGKGLEWVSLISGSGGRTYYADSVKGRFTISRDNSKNTLYLQMNSLRAEDTAVYYCAKHDYSNYPYFDYWGQGTLVTVSSGGGGSGGGGSGGGGSEIVLTQSPGTLSLSPGERATLSCRASQGVRSDYLAWYQQKPGQALRLLIYGASSRATGIPDRFSGSGSGTDFTLTISRLEPEDFAVYHCQQYGSTPPTFGGGTKLEIKSGGGGSEVQLVESGGGLVQPGGSLKLSCAASGFTFNKYAMNWVRQAPGKGLEWVARIRSKYNNYATYYADSVKDRFTISRDDSKNTAYLQMNNLKTEDTAVYYCVRHGNFGNSYISYWAYWGQGTLVTVSSGGGGSGGGGSGGGGSQTVVTQEPSLTVSPGGTVTLTCGSSTGAVTSGNYPNWVQQKPGQAPRGLIGGTKFLAPGTPARFSGSLLGGKAALTLSGVQPEDEAEYYCVLWYSNRWVFGGGTKLTVL

SEQ ID NO: 201 - protein, 5 aa, Artificial Sequence
  Synthetic peptide
TYAMS

SEQ ID NO: 202 - protein, 17 aa, Artificial Sequence
  Synthetic peptide
AISGSGGRTFYADSVEG

SEQ ID NO: 203 - protein, 11 aa, Artificial Sequence
  Synthetic peptide
HDYSNYPYFDY

SEQ ID NO: 204 - protein, 12 aa, Artificial Sequence
  Synthetic peptide
RASQSVRSTYLA

SEQ ID NO: 205 - protein, 7 aa, Artificial Sequence
  Synthetic peptide
GASSRAT

SEQ ID NO: 206 - protein, 9 aa, Artificial Sequence
  Synthetic peptide
QQYGDLPFT

SEQ ID NO: 207 - protein, 120 aa, Artificial Sequence
  Synthetic peptide
EVQLLESGGGMVQPGGSLRLSCAASGFTFSTYAMSWVRQAPGKGLEWVSAISGSGGRTFYADSVEGRFTISRDNSKNTLYLQMNSLRAEDTAVYYCAKHDYSNYPYFDYWGQGTLVTVSS

SEQ ID NO: 208 - protein, 108 aa, Artificial Sequence
  Synthetic peptide
EIVLTQSPGTLSLSPGERATLSCRASQSVRSTYLAWYQQKPGQAPRLLIYGASSRATGIPDRFSGSGSGTDFTLTISRLEPEDFAVYSCQQYGDLPFTFGPGTKLEIK

SEQ ID NO: 209 - protein, 243 aa, Artificial Sequence
  Synthetic peptide
EVQLLESGGGMVQPGGSLRLSCAASGFTFSTYAMSWVRQAPGKGLEWVSAISGSGGRTFYADSVEGRFTISRDNSKNTLYLQMNSLRAEDTAVYYCAKHDYSNYPYFDYWGQGTLVTVSSGGGGSGGGGSGGGGSEIVLTQSPGTLSLSPGERATLSCRASQSVRSTYLAWYQQKPGQAPRLLIYGASSRATGIPDRFSGSGSGTDFTLTISRLEPEDFAVYSCQQYGDLPFTFGPGTKLEIK

SEQ ID NO: 210 - protein, 498 aa, Artificial Sequence
  Synthetic peptide
EVQLLESGGGMVQPGGSLRLSCAASGFTFSTYAMSWVRQAPGKGLEWVSAISGSGGRTFYADSVEGRFTISRDNSKNTLYLQMNSLRAEDTAVYYCAKHDYSNYPYFDYWGQGTLVTVSSGGGGSGGGGSGGGGSEIVLTQSPGTLSLSPGERATLSCRASQSVRSTYLAWYQQKPGQAPRLLIYGASSRATGIPDRFSGSGSGTDFTLTISRLEPEDFAVYSCQQYGDLPFTFGPGTKLEIKSGGGGSEVQLVESGGGLVQPGGSLKLSCAASGFTFNKYAMNWVRQAPGKGLEWVARIRSKYNNYATYYADSVKDRFTISRDDSKNTAYLQMNNLKTEDTAVYYCVRHGNFGNSYISYWAYWGQGTLVTVSSGGGGSGGGGSGGGGSQTVVTQEPSLTVSPGGTVTLTCGSSTGAVTSGNYPNWVQQKPGQAPRGLIGGTKFLAPGTPARFSGSLLGGKAALTLSGVQPEDEAEYYCVLWYSNRWVFGGGTKLTVL

SEQ ID NO: 211 - protein, 5 aa, Artificial Sequence
  Synthetic peptide
SYAMS

SEQ ID NO: 212 - protein, 17 aa, Artificial Sequence
  Synthetic peptide
AISGSGGYTYYADSVKG

SEQ ID NO: 213 - protein, 11 aa, Artificial Sequence
  Synthetic peptide
HDYSNYPYFDY

SEQ ID NO: 214 - protein, 12 aa, Artificial Sequence
  Synthetic peptide
RASQSVRSNYLA

SEQ ID NO: 215 - protein, 7 aa, Artificial Sequence
  Synthetic peptide
GASSRAT

SEQ ID NO: 216 - protein, 9 aa, Artificial Sequence
  Synthetic peptide
QQYGDLPFT

SEQ ID NO: 217 - protein, 120 aa, Artificial Sequence
  Synthetic peptide
EVQLLESGGGLVQPGGSLRLSCAASGFTFSSYAMSWVRQAPGKGLEWVSAISGSGGYTYYADSVKGRFTISRDNSKNTLYLQMNSLRAEDTAVYYCAKHDYSNYPYFDYWGQGTLVTVSS

SEQ ID NO: 218 - protein, 108 aa, Artificial Sequence
  Synthetic peptide
EIVLTQSPGTLSLSPGERATLSCRASQSVRSNYLAWYQQKPGQAPRLLIYGASSRATGIPDRFSGSGSGTDFTLTISRLEPEDFAVYYCQQYGDLPFTFGPGTKVEIK

SEQ ID NO: 219 - protein, 243 aa, Artificial Sequence
  Synthetic peptide
EVQLLESGGGLVQPGGSLRLSCAASGFTFSSYAMSWVRQAPGKGLEWVSAISGSGGYTYYADSVKGRFTISRDNSKNTLYLQMNSLRAEDTAVYYCAKHDYSNYPYFDYWGQGTLVTVSSGGGGSGGGGSGGGGSEIVLTQSPGTLSLSPGERATLSCRASQSVRSNYLAWYQQKPGQAPRLLIYGASSRATGIPDRFSGSGSGTDFTLTISRLEPEDFAVYYCQQYGDLPFTFGPGTKVEIK

SEQ ID NO: 220 - protein, 498 aa, Artificial Sequence
  Synthetic peptide
EVQLLESGGGLVQPGGSLRLSCAASGFTFSSYAMSWVRQAPGKGLEWVSAISGSGGYTYYADSVKGRFTISRDNSKNTLYLQMNSLRAEDTAVYYCAKHDYSNYPYFDYWGQGTLVTVSSGGGGSGGGGSGGGGSEIVLTQSPGTLSLSPGERATLSCRASQSVRSNYLAWYQQKPGQAPRLLIYGASSRATGIPDRFSGSGSGTDFTLTISRLEPEDFAVYYCQQYGDLPFTFGPGTKVEIKSGGGGSEVQLVESGGGLVQPGGSLKLSCAASGFTFNKYAMNWVRQAPGKGLEWVARIRSKYNNYATYYADSVKDRFTISRDDSKNTAYLQMNNLKTEDTAVYYCVRHGNFGNSYISYWAYWGQGTLVTVSSGGGGSGGGGSGGGGSQTVVTQEPSLTVSPGGTVTLTCGSSTGAVTSGNYPNWVQQKPGQAPRGLIGGTKFLAPGTPARFSGSLLGGKAALTLSGVQPEDEAEYYCVLWYSNRWVFGGGTKLTVL

SEQ ID NO: 221 - protein, 5 aa, Artificial Sequence
  Synthetic peptide
VYAMS

SEQ ID NO: 222 - protein, 17 aa, Artificial Sequence
  Synthetic peptide
TISDSGGSTFYADSVKG

SEQ ID NO: 223 - protein, 11 aa, Artificial Sequence
  Synthetic peptide
HDYSNYAYFDY

SEQ ID NO: 224 - protein, 12 aa, Artificial Sequence
  Synthetic peptide
RASQSVRSSYLA

SEQ ID NO: 225 - protein, 7 aa, Artificial Sequence
  Synthetic peptide
GASSRAT

SEQ ID NO: 226 - protein, 9 aa, Artificial Sequence
  Synthetic peptide
QQYGDLPFT

SEQ ID NO: 227 - protein, 120 aa, Artificial Sequence
  Synthetic peptide
EVQLLESGGGLVQPGGSLRLSCAASGFTFSVYAMSWVRQAPGKGLEWVSTISDSGGSTFYADSVKGRFTISRDNSKNTLYLQMNRLRAEDTAVYYCARHDYSNYAYFDYWGQGTLVTVSS

SEQ ID NO: 228 - protein, 108 aa, Artificial Sequence
  Synthetic peptide
EIVLTQSPGTLSLSPGERATLSCRASQSVRSSYLAWYQQKPGQAPRLLIYGASSRATGIPDRFSGSGSGTDFTLTISRLEPEDFAVYYCQQYGDLPFTFGPGTKVEIK

SEQ ID NO: 229 - protein, 243 aa, Artificial Sequence
  Synthetic peptide
EVQLLESGGGLVQPGGSLRLSCAASGFTFSVYAMSWVRQAPGKGLEWVSTISDSGGSTFYADSVKGRFTISRDNSKNTLYLQMNRLRAEDTAVYYCARHDYSNYAYFDYWGQGTLVTVSSGGGGSGGGGSGGGGSEIVLTQSPGTLSLSPGERATLSCRASQSVRSSYLAWYQQKPGQAPRLLIYGASSRATGIPDRFSGSGSGTDFTLTISRLEPEDFAVYYCQQYGDLPFTFGPGTKVEIK

SEQ ID NO: 230 - protein, 498 aa, Artificial Sequence
  Synthetic peptide
EVQLLESGGGLVQPGGSLRLSCAASGFTFSVYAMSWVRQAPGKGLEWVSTISDSGGSTFYADSVKGRFTISRDNSKNTLYLQMNRLRAEDTAVYYCARHDYSNYAYFDYWGQGTLVTVSSGGGGSGGGGSGGGGSEIVLTQSPGTLSLSPGERATLSCRASQSVRSSYLAWYQQKPGQAPRLLIYGASSRATGIPDRFSGSGSGTDFTLTISRLEPEDFAVYYCQQYGDLPFTFGPGTKVEIKSGGGGSEVQLVESGGGLVQPGGSLKLSCAASGFTFNKYAMNWVRQAPGKGLEWVARIRSKYNNYATYYADSVKDRFTISRDDSKNTAYLQMNNLKTEDTAVYYCVRHGNFGNSYISYWAYWGQGTLVTVSSGGGGSGGGGSGGGGSQTVVTQEPSLTVSPGGTVTLTCGSSTGAVTSGNYPNWVQQKPGQAPRGLIGGTKFLAPGTPARFSGSLLGGKAALTLSGVQPEDEAEYYCVLWYSNRWVFGGGTKLTVL

SEQ ID NO: 231 - protein, 5 aa, Artificial Sequence
  Synthetic peptide
SYAMS

SEQ ID NO: 232 - protein, 17 aa, Artificial Sequence
  Synthetic peptide
AISGSGGSTFYADSVKG

SEQ ID NO: 233 - protein, 11 aa, Artificial Sequence
  Synthetic peptide
HDYSNYPYFDY

SEQ ID NO: 234 - protein, 12 aa, Artificial Sequence
  Synthetic peptide
RASQSVRSSYLA

SEQ ID NO: 235 - protein, 7 aa, Artificial Sequence
  Synthetic peptide
GASSRAT

SEQ ID NO: 236 - protein, 9 aa, Artificial Sequence
  Synthetic peptide
QQYGDLPFT

SEQ ID NO: 237 - protein, 120 aa, Artificial Sequence
  Synthetic peptide
EVQLLESGGGLAQPGGSLRLSCAASGFTFSSYAMSWVRQAPGKGLEWVSAISGSGGSTFYADSVKGRFTISRDNSKNTLYLQMNSLRAEDTAVYFCAKHDYSNYPYFDYWGQGTLVTVSS

SEQ ID NO: 238 - protein, 108 aa, Artificial Sequence; identical to SEQ ID NO: 228
  Synthetic peptide

SEQ ID NO: 239 - protein, 243 aa, Artificial Sequence
  Synthetic peptide
EVQLLESGGGLAQPGGSLRLSCAASGFTFSSYAMSWVRQAPGKGLEWVSAISGSGGSTFYADSVKGRFTISRDNSKNTLYLQMNSLRAEDTAVYFCAKHDYSNYPYFDYWGQGTLVTVSSGGGGSGGGGSGGGGSEIVLTQSPGTLSLSPGERATLSCRASQSVRSSYLAWYQQKPGQAPRLLIYGASSRATGIPDRFSGSGSGTDFTLTISRLEPEDFAVYYCQQYGDLPFTFGPGTKVEIK

SEQ ID NO: 240 - protein, 498 aa, Artificial Sequence
  Synthetic peptide
EVQLLESGGGLAQPGGSLRLSCAASGFTFSSYAMSWVRQAPGKGLEWVSAISGSGGSTFYADSVKGRFTISRDNSKNTLYLQMNSLRAEDTAVYFCAKHDYSNYPYFDYWGQGTLVTVSSGGGGSGGGGSGGGGSEIVLTQSPGTLSLSPGERATLSCRASQSVRSSYLAWYQQKPGQAPRLLIYGASSRATGIPDRFSGSGSGTDFTLTISRLEPEDFAVYYCQQYGDLPFTFGPGTKVEIKSGGGGSEVQLVESGGGLVQPGGSLKLSCAASGFTFNKYAMNWVRQAPGKGLEWVARIRSKYNNYATYYADSVKDRFTISRDDSKNTAYLQMNNLKTEDTAVYYCVRHGNFGNSYISYWAYWGQGTLVTVSSGGGGSGGGGSGGGGSQTVVTQEPSLTVSPGGTVTLTCGSSTGAVTSGNYPNWVQQKPGQAPRGLIGGTKFLAPGTPARFSGSLLGGKAALTLSGVQPEDEAEYYCVLWYSNRWVFGGGTKLTVL

SEQ ID NO: 241 - protein, 5 aa, Artificial Sequence
  Synthetic peptide
SYAMS

SEQ ID NO: 242 - protein, 17 aa, Artificial Sequence
  Synthetic peptide
AISGSGGRTFYADSVEG

SEQ ID NO: 243 - protein, 11 aa, Artificial Sequence
  Synthetic peptide
HDYSNYPYFDY

SEQ ID NO: 244 - protein, 12 aa, Artificial Sequence
  Synthetic peptide
RASQSVRSNYLA

SEQ ID NO: 245 - protein, 7 aa, Artificial Sequence
  Synthetic peptide
GASSRAT

SEQ ID NO: 246 - protein, 9 aa, Artificial Sequence
  Synthetic peptide
QQYGDLPFT

SEQ ID NO: 247 - protein, 120 aa, Artificial Sequence; identical to SEQ ID NO: 157
  Synthetic peptide

SEQ ID NO: 248 - protein, 108 aa, Artificial Sequence; identical to SEQ ID NO: 218
  Synthetic peptide

SEQ ID NO: 249 - protein, 243 aa, Artificial Sequence
  Synthetic peptide
EVQLLESGGGMVQPGGSLRLSCAASGFTFSSYAMSWVRQAPGKGLEWVSAISGSGGRTFYADSVEGRFTISRDNSKNTLYLQMNSLRAEDTAVYYCAKHDYSNYPYFDYWGQGTLVTVSSGGGGSGGGGSGGGGSEIVLTQSPGTLSLSPGERATLSCRASQSVRSNYLAWYQQKPGQAPRLLIYGASSRATGIPDRFSGSGSGTDFTLTISRLEPEDFAVYYCQQYGDLPFTFGPGTKVEIK

SEQ ID NO: 250 - protein, 498 aa, Artificial Sequence
  Synthetic peptide
EVQLLESGGGMVQPGGSLRLSCAASGFTFSSYAMSWVRQAPGKGLEWVSAISGSGGRTFYADSVEGRFTISRDNSKNTLYLQMNSLRAEDTAVYYCAKHDYSNYPYFDYWGQGTLVTVSSGGGGSGGGGSGGGGSEIVLTQSPGTLSLSPGERATLSCRASQSVRSNYLAWYQQKPGQAPRLLIYGASSRATGIPDRFSGSGSGTDFTLTISRLEPEDFAVYYCQQYGDLPFTFGPGTKVEIKSGGGGSEVQLVESGGGLVQPGGSLKLSCAASGFTFNKYAMNWVRQAPGKGLEWVARIRSKYNNYATYYADSVKDRFTISRDDSKNTAYLQMNNLKTEDTAVYYCVRHGNFGNSYISYWAYWGQGTLVTVSSGGGGSGGGGSGGGGSQTVVTQEPSLTVSPGGTVTLTCGSSTGAVTSGNYPNWVQQKPGQAPRGLIGGTKFLAPGTPARFSGSLLGGKAALTLSGVQPEDEAEYYCVLWYSNRWVFGGGTKLTVL

SEQ ID NO: 251 - protein, 5 aa, Artificial Sequence
  Synthetic peptide
SYAMS

SEQ ID NO: 252 - protein, 17 aa, Artificial Sequence
  Synthetic peptide
AISGSGGRTFYADSVEG

SEQ ID NO: 253 - protein, 11 aa, Artificial Sequence
  Synthetic peptide
HDYSNYPYFDY

SEQ ID NO: 254 - protein, 12 aa, Artificial Sequence
  Synthetic peptide
RASQSVRSSYLA

SEQ ID NO: 255 - protein, 7 aa, Artificial Sequence
  Synthetic peptide
GASSRAT

SEQ ID NO: 256 - protein, 9 aa, Artificial Sequence
  Synthetic peptide
QQYGSSPFT

SEQ ID NO: 257 - protein, 120 aa, Artificial Sequence; identical to SEQ ID NO: 157
  Synthetic peptide

SEQ ID NO: 258 - protein, 108 aa, Artificial Sequence
  Synthetic peptide
EIVLTQSPGTLSLSPGERATLSCRASQSVRSSYLAWYQQKPGQAPRLLIYGASSRATGIPDRFSGSGSGTDFTLTISRLEPEDFAVYYCQQYGSSPFTFGPGTKVEIK

SEQ ID NO: 259 - protein, 243 aa, Artificial Sequence
  Synthetic peptide
EVQLLESGGGMVQPGGSLRLSCAASGFTFSSYAMSWVRQAPGKGLEWVSAISGSGGRTFYADSVEGRFTISRDNSKNTLYLQMNSLRAEDTAVYYCAKHDYSNYPYFDYWGQGTLVTVSSGGGGSGGGGSGGGGSEIVLTQSPGTLSLSPGERATLSCRASQSVRSSYLAWYQQKPGQAPRLLIYGASSRATGIPDRFSGSGSGTDFTLTISRLEPEDFAVYYCQQYGSSPFTFGPGTKVEIK

SEQ ID NO: 260 - protein, 498 aa, Artificial Sequence
  Synthetic peptide
EVQLLESGGGMVQPGGSLRLSCAASGFTFSSYAMSWVRQAPGKGLEWVSAISGSGGRTFYADSVEGRFTISRDNSKNTLYLQMNSLRAEDTAVYYCAKHDYSNYPYFDYWGQGTLVTVSSGGGGSGGGGSGGGGSEIVLTQSPGTLSLSPGERATLSCRASQSVRSSYLAWYQQKPGQAPRLLIYGASSRATGIPDRFSGSGSGTDFTLTISRLEPEDFAVYYCQQYGSSPFTFGPGTKVEIKSGGGGSEVQLVESGGGLVQPGGSLKLSCAASGFTFNKYAMNWVRQAPGKGLEWVARIRSKYNNYATYYADSVKDRFTISRDDSKNTAYLQMNNLKTEDTAVYYCVRHGNFGNSYISYWAYWGQGTLVTVSSGGGGSGGGGSGGGGSQTVVTQEPSLTVSPGGTVTLTCGSSTGAVTSGNYPNWVQQKPGQAPRGLIGGTKFLAPGTPARFSGSLLGGKAALTLSGVQPEDEAEYYCVLWYSNRWVFGGGTKLTVL

SEQ ID NO: 261 - protein, 5 aa, Artificial Sequence
  Synthetic peptide
TYAMS

SEQ ID NO: 262 - protein, 17 aa, Artificial Sequence
  Synthetic peptide
AISGSGGGTFYADSVKG

SEQ ID NO: 263 - protein, 11 aa, Artificial Sequence
  Synthetic peptide
HDYSNYPYFDY

SEQ ID NO: 264 - protein, 12 aa, Artificial Sequence
  Synthetic peptide
RASQSIRSNYLA

SEQ ID NO: 265 - protein, 7 aa, Artificial Sequence
  Synthetic peptide
GASSRAT

SEQ ID NO: 266 - protein, 9 aa, Artificial Sequence
  Synthetic peptide
QQYGSSPFT

SEQ ID NO: 267 - protein, 120 aa, Artificial Sequence
  Synthetic peptide
EVQLLESGGGLVQPGGSLRLSCAASGFTFSTYAMSWVRQAPGKGLEWVSAISGSGGGTFYADSVKGRFTISRDNSKNTLYLQMNSLRAEDTAVYYCAKHDYSNYPYFDYWGQGTLVTVSS

SEQ ID NO: 268 - protein, 108 aa, Artificial Sequence
  Synthetic peptide
EIVLTQSPGTLSLSPGERATLSCRASQSIRSNYLAWYQQKPGQAPRLLIYGASSRATGIPDRFSGSGSGTDFTLTISRLEPEDFAVYYCQQYGSSPFTFGPGTKVEIK

SEQ ID NO: 269 - protein, 243 aa, Artificial Sequence
  Synthetic peptide
EVQLLESGGGLVQPGGSLRLSCAASGFTFSTYAMSWVRQAPGKGLEWVSAISGSGGGTFYADSVKGRFTISRDNSKNTLYLQMNSLRAEDTAVYYCAKHDYSNYPYFDYWGQGTLVTVSSGGGGSGGGGSGGGGSEIVLTQSPGTLSLSPGERATLSCRASQSIRSNYLAWYQQKPGQAPRLLIYGASSRATGIPDRFSGSGSGTDFTLTISRLEPEDFAVYYCQQYGSSPFTFGPGTKVEIK

SEQ ID NO: 270 - protein, 498 aa, Artificial Sequence
  Synthetic peptide
EVQLLESGGGLVQPGGSLRLSCAASGFTFSTYAMSWVRQAPGKGLEWVSAISGSGGGTFYADSVKGRFTISRDNSKNTLYLQMNSLRAEDTAVYYCAKHDYSNYPYFDYWGQGTLVTVSSGGGGSGGGGSGGGGSEIVLTQSPGTLSLSPGERATLSCRASQSIRSNYLAWYQQKPGQAPRLLIYGASSRATGIPDRFSGSGSGTDFTLTISRLEPEDFAVYYCQQYGSSPFTFGPGTKVEIKSGGGGSEVQLVESGGGLVQPGGSLKLSCAASGFTFNKYAMNWVRQAPGKGLEWVARIRSKYNNYATYYADSVKDRFTISRDDSKNTAYLQMNNLKTEDTAVYYCVRHGNFGNSYISYWAYWGQGTLVTVSSGGGGSGGGGSGGGGSQTVVTQEPSLTVSPGGTVTLTCGSSTGAVTSGNYPNWVQQKPGQAPRGLIGGTKFLAPGTPARFSGSLLGGKAALTLSGVQPEDEAEYYCVLWYSNRWVFGGGTKLTVL

SEQ ID NO: 271 - protein, 5 aa, Artificial Sequence
  Synthetic peptide
TYAMS

SEQ ID NO: 272 - protein, 17 aa, Artificial Sequence
  Synthetic peptide
LISGSGGRTYYADSVKG

SEQ ID NO: 273 - protein, 11 aa, Artificial Sequence
  Synthetic peptide
HDYSNYPYFDY

SEQ ID NO: 274 - protein, 12 aa, Artificial Sequence
  Synthetic peptide
RASQSVRSNYLA

SEQ ID NO: 275 - protein, 7 aa, Artificial Sequence
  Synthetic peptide
GASNRAT

SEQ ID NO: 276 - protein, 9 aa, Artificial Sequence
  Synthetic peptide
QQYGISPPT

SEQ ID NO: 277 - protein, 120 aa, Artificial Sequence; identical to SEQ ID NO: 197
  Synthetic peptide

SEQ ID NO: 278 - protein, 108 aa, Artificial Sequence
  Synthetic peptide
EIVLTQSPGTLSLSPGERATLSCRASQSVRSNYLAWYQQKPGQAPRLLIYGASNRATGIPDRFSGSGSGTDFTLTISRLEPEDFAVYSCQQYGISPPTFGGGTKVEIK

SEQ ID NO: 279 - protein, 243 aa, Artificial Sequence
  Synthetic peptide
EVQLLESGGGLVQPGGSLRLSCAASGFTFSTYAMSWVRQAPGKGLEWVSLISGSGGRTYYADSVKGRFTISRDNSKNTLYLQMNSLRAEDTAVYYCAKHDYSNYPYFDYWGQGTLVTVSSGGGGSGGGGSGGGGSEIVLTQSPGTLSLSPGERATLSCRASQSVRSNYLAWYQQKPGQAPRLLIYGASNRATGIPDRFSGSGSGTDFTLTISRLEPEDFAVYSCQQYGISPPTFGGGTKVEIK

SEQ ID NO: 280 - protein, 498 aa, Artificial Sequence
  Synthetic peptide
EVQLLESGGGLVQPGGSLRLSCAASGFTFSTYAMSWVRQAPGKGLEWVSLISGSGGRTYYADSVKGRFTISRDNSKNTLYLQMNSLRAEDTAVYYCAKHDYSNYPYFDYWGQGTLVTVSSGGGGSGGGGSGGGGSEIVLTQSPGTLSLSPGERATLSCRASQSVRSNYLAWYQQKPGQAPRLLIYGASNRATGIPDRFSGSGSGTDFTLTISRLEPEDFAVYSCQQYGISPPTFGGGTKVEIKSGGGGSEVQLVESGGGLVQPGGSLKLSCAASGFTFNKYAMNWVRQAPGKGLEWVARIRSKYNNYATYYADSVKDRFTISRDDSKNTAYLQMNNLKTEDTAVYYCVRHGNFGNSYISYWAYWGQGTLVTVSSGGGGSGGGGSGGGGSQTVVTQEPSLTVSPGGTVTLTCGSSTGAVTSGNYPNWVQQKPGQAPRGLIGGTKFLAPGTPARFSGSLLGGKAALTLSGVQPEDEAEYYCVLWYSNRWVFGGGTKLTVL

SEQ ID NO: 281 - protein, 5 aa, Artificial Sequence
  Synthetic peptide
SYAMS

SEQ ID NO: 282 - protein, 17 aa, Artificial Sequence
  Synthetic peptide
VISGSGGRTHYADSGKG

SEQ ID NO: 283 - protein, 11 aa, Artificial Sequence
  Synthetic peptide
HDYSNYPYFDY

SEQ ID NO: 284 - protein, 12 aa, Artificial Sequence
  Synthetic peptide
RASQSVRSSYLA

SEQ ID NO: 285 - protein, 7 aa, Artificial Sequence
  Synthetic peptide
GASSRAT

SEQ ID NO: 286 - protein, 9 aa, Artificial Sequence
  Synthetic peptide
EQYGNSPPT

SEQ ID NO: 287 - protein, 120 aa, Artificial Sequence
  Synthetic peptide
EVQLLESGGGLVQPGGSLRLSCAASGFNFASYAMSWVRQAPGKGLEWVSVISGSGGRTHYADSGKGRFTISRDNSKNTLYLQMNSLRAEDTAVYYCAKHDYSNYPYFDYWGQGTLVTVSS

SEQ ID NO: 288 - protein, 108 aa, Artificial Sequence
  Synthetic peptide
EIVLTQSPGTLSLSPGERATLSCRASQSVRSSYLAWYQQKPGQAPRLLIFGASSRATGIPDRFSGSESGTDFTLTINRLEPEDFAVYYCEQYGNSPPTFGGGTKVEIK

SEQ ID NO: 289 - protein, 243 aa, Artificial Sequence
  Synthetic peptide
EVQLLESGGGLVQPGGSLRLSCAASGFNFASYAMSWVRQAPGKGLEWVSVISGSGGRTHYADSGKGRFTISRDNSKNTLYLQMNSLRAEDTAVYYCAKHDYSNYPYFDYWGQGTLVTVSSGGGGSGGGGSGGGGSEIVLTQSPGTLSLSPGERATLSCRASQSVRSSYLAWYQQKPGQAPRLLIFGASSRATGIPDRFSGSESGTDFTLTINRLEPEDFAVYYCEQYGNSPPTFGGGTKVEIK

SEQ ID NO: 290 - protein, 498 aa, Artificial Sequence
  Synthetic peptide
EVQLLESGGGLVQPGGSLRLSCAASGFNFASYAMSWVRQAPGKGLEWVSVISGSGGRTHYADSGKGRFTISRDNSKNTLYLQMNSLRAEDTAVYYCAKHDYSNYPYFDYWGQGTLVTVSSGGGGSGGGGSGGGGSEIVLTQSPGTLSLSPGERATLSCRASQSVRSSYLAWYQQKPGQAPRLLIFGASSRATGIPDRFSGSESGTDFTLTINRLEPEDFAVYYCEQYGNSPPTFGGGTKVEIKSGGGGSEVQLVESGGGLVQPGGSLKLSCAASGFTFNKYAMNWVRQAPGKGLEWVARIRSKYNNYATYYADSVKDRFTISRDDSKNTAYLQMNNLKTEDTAVYYCVRHGNFGNSYISYWAYWGQGTLVTVSSGGGGSGGGGSGGGGSQTVVTQEPSLTVSPGGTVTLTCGSSTGAVTSGNYPNWVQQKPGQAPRGLIGGTKFLAPGTPARFSGSLLGGKAALTLSGVQPEDEAEYYCVLWYSNRWVFGGGTKLTVL

SEQ ID NO: 291 - protein, 5 aa, Artificial Sequence
  Synthetic peptide
TYAMS

SEQ ID NO: 292 - protein, 17 aa, Artificial Sequence
  Synthetic peptide
LISGSGGRTYYADSVKG

SEQ ID NO: 293 - protein, 11 aa, Artificial Sequence
  Synthetic peptide
HDYSNYPYFDY

SEQ ID NO: 294 - protein, 12 aa, Artificial Sequence
  Synthetic peptide
RASQSVRSSYLA

SEQ ID NO: 295 - protein, 7 aa, Artificial Sequence
  Synthetic peptide
GASSRAT

SEQ ID NO: 296 - protein, 9 aa, Artificial Sequence
  Synthetic peptide
QQYGSSPPP

SEQ ID NO: 297 - protein, 120 aa, Artificial Sequence
  Synthetic peptide
EVQLLESGGGVVQPGRSLRLSCAASGFTFSTYAMSWVRQAPGKGLEWVSLISGSGGRTYYADSVKGRFTISRDNSKNTLYLQMNSLRAEDTAVYYCAKHDYSNYPYFDYWGQGTLVTVSS

SEQ ID NO: 298 - protein, 108 aa, Artificial Sequence
  Synthetic peptide
EIVLTQSPGTLSLSPGERATLSCRASQSVRSSYLAWYQQKPGQAPRLLIYGASSRATGIPDRFSGSGSGTDFTLTISRLEPEDFAVYYCQQYGSSPPPFGGGTKVEIK

SEQ ID NO: 299 - protein, 243 aa, Artificial Sequence
  Synthetic peptide
EVQLLESGGGVVQPGRSLRLSCAASGFTFSTYAMSWVRQAPGKGLEWVSLISGSGGRTYYADSVKGRFTISRDNSKNTLYLQMNSLRAEDTAVYYCAKHDYSNYPYFDYWGQGTLVTVSSGGGGSGGGGSGGGGSEIVLTQSPGTLSLSPGERATLSCRASQSVRSSYLAWYQQKPGQAPRLLIYGASSRATGIPDRFSGSGSGTDFTLTISRLEPEDFAVYYCQQYGSSPPPFGGGTKVEIK

SEQ ID NO: 300 - protein, 498 aa, Artificial Sequence
  Synthetic peptide
EVQLLESGGGVVQPGRSLRLSCAASGFTFSTYAMSWVRQAPGKGLEWVSLISGSGGRTYYADSVKGRFTISRDNSKNTLYLQMNSLRAEDTAVYYCAKHDYSNYPYFDYWGQGTLVTVSSGGGGSGGGGSGGGGSEIVLTQSPGTLSLSPGERATLSCRASQSVRSSYLAWYQQKPGQAPRLLIYGASSRATGIPDRFSGSGSGTDFTLTISRLEPEDFAVYYCQQYGSSPPPFGGGTKVEIKSGGGGSEVQLVESGGGLVQPGGSLKLSCAASGFTFNKYAMNWVRQAPGKGLEWVARIRSKYNNYATYYADSVKDRFTISRDDSKNTAYLQMNNLKTEDTAVYYCVRHGNFGNSYISYWAYWGQGTLVTVSSGGGGSGGGGSGGGGSQTVVTQEPSLTVSPGGTVTLTCGSSTGAVTSGNYPNWVQQKPGQAPRGLIGGTKFLAPGTPARFSGSLLGGKAALTLSGVQPEDEAEYYCVLWYSNRWVFGGGTKLTVL

SEQ ID NO: 301 - protein, 5 aa, Artificial Sequence
  Synthetic peptide
SYAMS

SEQ ID NO: 302 - protein, 17 aa, Artificial Sequence
  Synthetic peptide
AISGSGGRAQYADSVQG

SEQ ID NO: 303 - protein, 11 aa, Artificial Sequence
  Synthetic peptide
HDYSNYPYFDY

SEQ ID NO: 304 - protein, 11 aa, Artificial Sequence
  Synthetic peptide
RASQSVSSNLA

SEQ ID NO: 305 - protein, 7 aa, Artificial Sequence
  Synthetic peptide
GSSSRAT

SEQ ID NO: 306 - protein, 9 aa, Artificial Sequence
  Synthetic peptide
QQYGSSPPP

SEQ ID NO: 307 - protein, 120 aa, Artificial Sequence
  Synthetic peptide
EVQLLESGGGLVQPGGSLRLSCAASGFTFSSYAMSWVRQSPGKGLEWVSAISGSGGRAQYADSVQGRFTVSRDNSKNTLYLQMNSLRAEDTAVYYCAKHDYSNYPYFDYWGQGTLVTVSS

SEQ ID NO: 308 - protein, 107 aa, Artificial Sequence
  Synthetic peptide
EIVLTQSPATLSVSPGERATLSCRASQSVSSNLAWYQQKPGQAPRLLIYGSSSRATGIPDRFSGSGSGTDFTLTISRLEPEDFAVYYCQQYGSSPPPFGGGTKVEIK

SEQ ID NO: 309 - protein, 242 aa, Artificial Sequence
  Synthetic peptide
EVQLLESGGGLVQPGGSLRLSCAASGFTFSSYAMSWVRQSPGKGLEWVSAISGSGGRAQYADSVQGRFTVSRDNSKNTLYLQMNSLRAEDTAVYYCAKHDYSNYPYFDYWGQGTLVTVSSGGGGSGGGGSGGGGSEIVLTQSPATLSVSPGERATLSCRASQSVSSNLAWYQQKPGQAPRLLIYGSSSRATGIPDRFSGSGSGTDFTLTISRLEPEDFAVYYCQQYGSSPPPFGGGTKVEIK

SEQ ID NO: 310 - protein, 497 aa, Artificial Sequence
  Synthetic peptide
EVQLLESGGGLVQPGGSLRLSCAASGFTFSSYAMSWVRQSPGKGLEWVSAISGSGGRAQYADSVQGRFTVSRDNSKNTLYLQMNSLRAEDTAVYYCAKHDYSNYPYFDYWGQGTLVTVSSGGGGSGGGGSGGGGSEIVLTQSPATLSVSPGERATLSCRASQSVSSNLAWYQQKPGQAPRLLIYGSSSRATGIPDRFSGSGSGTDFTLTISRLEPEDFAVYYCQQYGSSPPPFGGGTKVEIKSGGGGSEVQLVESGGGLVQPGGSLKLSCAASGFTFNKYAMNWVRQAPGKGLEWVARIRSKYNNYATYYADSVKDRFTISRDDSKNTAYLQMNNLKTEDTAVYYCVRHGNFGNSYISYWAYWGQGTLVTVSSGGGGSGGGGSGGGGSQTVVTQEPSLTVSPGGTVTLTCGSSTGAVTSGNYPNWVQQKPGQAPRGLIGGTKFLAPGTPARFSGSLLGGKAALTLSGVQPEDEAEYYCVLWYSNRWVFGGGTKLTVL

SEQ ID NO: 311 - protein, 5 aa, Artificial Sequence
  Synthetic peptide
SYAMS

SEQ ID NO: 312 - protein, 17 aa, Artificial Sequence
  Synthetic peptide
AISGSGGRTFYADSVEG

SEQ ID NO: 313 - protein, 11 aa, Artificial Sequence
  Synthetic peptide
HDYSNYPYFDY

SEQ ID NO: 314 - protein, 12 aa, Artificial Sequence
  Synthetic peptide
RASQGVRSDYLA

SEQ ID NO: 315 - protein, 7 aa, Artificial Sequence
  Synthetic peptide
GASSRAT

SEQ ID NO: 316 - protein, 9 aa, Artificial Sequence
  Synthetic peptide
QQYGSTPPT

SEQ ID NO: 317 - protein, 120 aa, Artificial Sequence
  Synthetic peptide
EVQLLESGGGMVQPGGSLRLSCAASGFTFSSYAMSWVRQAPGKGLEWVSAISGSGGRTFYADSVEGRFTISRDNSKNTLYLQMNSLRAEDTAVYYCTKHDYSNYPYFDYWGQGTLVTVSS

SEQ ID NO: 318 - protein, 108 aa, Artificial Sequence
  Synthetic peptide
EIVLTQSPGTLSLSPGERATLSCRASQGVRSDYLAWYQQKPGQAPRLLIYGASSRATGIPDRFSGSGSGTDFTLTISRLEPEDFAVYHCQQYGSTPPTFGGGTKVEIK

SEQ ID NO: 319 - protein, 243 aa, Artificial Sequence
  Synthetic peptide
EVQLLESGGGMVQPGGSLRLSCAASGFTFSSYAMSWVRQAPGKGLEWVSAISGSGGRTFYADSVEGRFTISRDNSKNTLYLQMNSLRAEDTAVYYCTKHDYSNYPYFDYWGQGTLVTVSSGGGGSGGGGSGGGGSEIVLTQSPGTLSLSPGERATLSCRASQGVRSDYLAWYQQKPGQAPRLLIYGASSRATGIPDRFSGSGSGTDFTLTISRLEPEDFAVYHCQQYGSTPPTFGGGTKVEIK

SEQ ID NO: 320 - protein, 498 aa, Artificial Sequence
  Synthetic peptide
EVQLLESGGGMVQPGGSLRLSCAASGFTFSSYAMSWVRQAPGKGLEWVSAISGSGGRTFYADSVEGRFTISRDNSKNTLYLQMNSLRAEDTAVYYCTKHDYSNYPYFDYWGQGTLVTVSSGGGGSGGGGSGGGGSEIVLTQSPGTLSLSPGERATLSCRASQGVRSDYLAWYQQKPGQAPRLLIYGASSRATGIPDRFSGSGSGTDFTLTISRLEPEDFAVYHCQQYGSTPPTFGGGTKVEIKSGGGGSEVQLVESGGGLVQPGGSLKLSCAASGFTFNKYAMNWVRQAPGKGLEWVARIRSKYNNYATYYADSVKDRFTISRDDSKNTAYLQMNNLKTEDTAVYYCVRHGNFGNSYISYWAYWGQGTLVTVSSGGGGSGGGGSGGGGSQTVVTQEPSLTVSPGGTVTLTCGSSTGAVTSGNYPNWVQQKPGQAPRGLIGGTKFLAPGTPARFSGSLLGGKAALTLSGVQPEDEAEYYCVLWYSNRWVFGGGTKLTVL

SEQ ID NO: 321 - protein, 5 aa, Artificial Sequence
  Synthetic peptide
TYAMS

SEQ ID NO: 322 - protein, 17 aa, Artificial Sequence
  Synthetic peptide
TISDSGGSTFYADSVMG

SEQ ID NO: 323 - protein, 11 aa, Artificial Sequence
  Synthetic peptide
HDYSNYAFFDY

SEQ ID NO: 324 - protein, 11 aa, Artificial Sequence
  Synthetic peptide
RASQSVSSNLA

SEQ ID NO: 325 - protein, 7 aa, Artificial Sequence
  Synthetic peptide
GASSRAT

SEQ ID NO: 326 - protein, 9 aa, Artificial Sequence
  Synthetic peptide
QQYYSTPFT

SEQ ID NO: 327 - protein, 120 aa, Artificial Sequence
  Synthetic peptide
EVQLLESGGGLVQPGGSLRLSCAASGFTFSTYAMSWVRQAPGKGLEWVSTISDSGGSTFYADSVMGRFTISRDNSKNTLYLQMNSLRAEDTAVYYCARHDYSNYAFFDYWGQGTLVTVSS

SEQ ID NO: 328 - protein, 107 aa, Artificial Sequence
  Synthetic peptide
EIVLTQSPATLSVSPGERATLSCRASQSVSSNLAWYQQKPGQAPRLLIYGASSRATGIPDRFSGSGSGTDFTLTISSLQAEDVAVYYCQQYYSTPFTFGPGTKVEIK

SEQ ID NO: 329 - protein, 242 aa, Artificial Sequence
  Synthetic peptide
EVQLLESGGGLVQPGGSLRLSCAASGFTFSTYAMSWVRQAPGKGLEWVSTISDSGGSTFYADSVMGRFTISRDNSKNTLYLQMNSLRAEDTAVYYCARHDYSNYAFFDYWGQGTLVTVSSGGGGSGGGGSGGGGSEIVLTQSPATLSVSPGERATLSCRASQSVSSNLAWYQQKPGQAPRLLIYGASSRATGIPDRFSGSGSGTDFTLTISSLQAEDVAVYYCQQYYSTPFTFGPGTKVEIK

SEQ ID NO: 330 - protein, 497 aa, Artificial Sequence
  Synthetic peptide
EVQLLESGGGLVQPGGSLRLSCAASGFTFSTYAMSWVRQAPGKGLEWVSTISDSGGSTFYADSVMGRFTISRDNSKNTLYLQMNSLRAEDTAVYYCARHDYSNYAFFDYWGQGTLVTVSSGGGGSGGGGSGGGGSEIVLTQSPATLSVSPGERATLSCRASQSVSSNLAWYQQKPGQAPRLLIYGASSRATGIPDRFSGSGSGTDFTLTISSLQAEDVAVYYCQQYYSTPFTFGPGTKVEIKSGGGGSEVQLVESGGGLVQPGGSLKLSCAASGFTFNKYAMNWVRQAPGKGLEWVARIRSKYNNYATYYADSVKDRFTISRDDSKNTAYLQMNNLKTEDTAVYYCVRHGNFGNSYISYWAYWGQGTLVTVSSGGGGSGGGGSGGGGSQTVVTQEPSLTVSPGGTVTLTCGSSTGAVTSGNYPNWVQQKPGQAPRGLIGGTKFLAPGTPARFSGSLLGGKAALTLSGVQPEDEAEYYCVLWYSNRWVFGGGTKLTVL

SEQ ID NO: 331 - protein, 5 aa, Artificial Sequence
  Synthetic peptide
TYAMS

SEQ ID NO: 332 - protein, 17 aa, Artificial Sequence
  Synthetic peptide
TISDSGGSTFYADSVMG

SEQ ID NO: 333 - protein, 11 aa, Artificial Sequence
  Synthetic peptide
HDYSNYAFFDY

SEQ ID NO: 334 - protein, 11 aa, Artificial Sequence
  Synthetic peptide
RASQSVSSNLA

SEQ ID NO: 335 - protein, 7 aa, Artificial Sequence
  Synthetic peptide
GASTRAT

SEQ ID NO: 336 - protein, 9 aa, Artificial Sequence
  Synthetic peptide
QQYYSTPFT

SEQ ID NO: 337 - protein, 120 aa, Artificial Sequence; identical to SEQ ID NO: 327
  Synthetic peptide

SEQ ID NO: 338 - protein, 107 aa, Artificial Sequence
  Synthetic peptide
EIVLTQSPATLSVSPGERATLSCRASQSVSSNLAWYQQKPGQAPRLLIYGASTRATGIPARFSGSGSGTEFTLAISRLEPEDFAVYYCQQYYSTPFTFGGGTKVEIK

SEQ ID NO: 339 - protein, 242 aa, Artificial Sequence
  Synthetic peptide
EVQLLESGGGLVQPGGSLRLSCAASGFTFSTYAMSWVRQAPGKGLEWVSTISDSGGSTFYADSVMGRFTISRDNSKNTLYLQMNSLRAEDTAVYYCARHDYSNYAFFDYWGQGTLVTVSSGGGGSGGGGSGGGGSEIVLTQSPATLSVSPGERATLSCRASQSVSSNLAWYQQKPGQAPRLLIYGASTRATGIPARFSGSGSGTEFTLAISRLEPEDFAVYYCQQYYSTPFTFGGGTKVEIK

SEQ ID NO: 340 - protein, 497 aa, Artificial Sequence
  Synthetic peptide
EVQLLESGGGLVQPGGSLRLSCAASGFTFSTYAMSWVRQAPGKGLEWVSTISDSGGSTFYADSVMGRFTISRDNSKNTLYLQMNSLRAEDTAVYYCARHDYSNYAFFDYWGQGTLVTVSSGGGGSGGGGSGGGGSEIVLTQSPATLSVSPGERATLSCRASQSVSSNLAWYQQKPGQAPRLLIYGASTRATGIPARFSGSGSGTEFTLAISRLEPEDFAVYYCQQYYSTPFTFGGGTKVEIKSGGGGSEVQLVESGGGLVQPGGSLKLSCAASGFTFNKYAMNWVRQAPGKGLEWVARIRSKYNNYATYYADSVKDRFTISRDDSKNTAYLQMNNLKTEDTAVYYCVRHGNFGNSYISYWAYWGQGTLVTVSSGGGGSGGGGSGGGGSQTVVTQEPSLTVSPGGTVTLTCGSSTGAVTSGNYPNWVQQKPGQAPRGLIGGTKFLAPGTPARFSGSLLGGKAALTLSGVQPEDEAEYYCVLWYSNRWVFGGGTKLTVL

SEQ ID NO: 341 - protein, 5 aa, Artificial Sequence
  Synthetic peptide
TYAMS

SEQ ID NO: 342 - protein, 17 aa, Artificial Sequence
  Synthetic peptide
AISGSGGYTYYADSVEG

SEQ ID NO: 343 - protein, 11 aa, Artificial Sequence
  Synthetic peptide
HDYSNYAWFDP

SEQ ID NO: 344 - protein, 12 aa, Artificial Sequence
  Synthetic peptide
RASQSVSSAYLA

SEQ ID NO: 345 - protein, 7 aa, Artificial Sequence
  Synthetic peptide
GASSRAT

SEQ ID NO: 346 - protein, 9 aa, Artificial Sequence
  Synthetic peptide
QQFGSSPFT

SEQ ID NO: 347 - protein, 120 aa, Artificial Sequence
  Synthetic peptide
EVQLLESGGGLVQPGGSLRLSCAASGFTFSTYAMSWVRQAPGKGLDWVSAISGSGGYTYYADSVEGRFTISRDNSRNTLYLQMNSLRAEDTAVYYCASHDYSNYAWFDPWGQGTLVTVSS

SEQ ID NO: 348 - protein, 108 aa, Artificial Sequence
  Synthetic peptide
EIVLTQSPGTLSLSPGERATLSCRASQSVSSAYLAWYQQKPGQAPRLLIYGASSRATGIPDRFSGSGSGTDFTLTISRLEPEDFAVYYCQQFGSSPFTFGPGTKVEIK

SEQ ID NO: 349 - protein, 243 aa, Artificial Sequence
  Synthetic peptide
EVQLLESGGGLVQPGGSLRLSCAASGFTFSTYAMSWVRQAPGKGLDWVSAISGSGGYTYYADSVEGRFTISRDNSRNTLYLQMNSLRAEDTAVYYCASHDYSNYAWFDPWGQGTLVTVSSGGGGSGGGGSGGGGSEIVLTQSPGTLSLSPGERATLSCRASQSVSSAYLAWYQQKPGQAPRLLIYGASSRATGIPDRFSGSGSGTDFTLTISRLEPEDFAVYYCQQFGSSPFTFGPGTKVEIK

SEQ ID NO: 350 - protein, 498 aa, Artificial Sequence
  Synthetic peptide
EVQLLESGGGLVQPGGSLRLSCAASGFTFSTYAMSWVRQAPGKGLDWVSAISGSGGYTYYADSVEGRFTISRDNSRNTLYLQMNSLRAEDTAVYYCASHDYSNYAWFDPWGQGTLVTVSSGGGGSGGGGSGGGGSEIVLTQSPGTLSLSPGERATLSCRASQSVSSAYLAWYQQKPGQAPRLLIYGASSRATGIPDRFSGSGSGTDFTLTISRLEPEDFAVYYCQQFGSSPFTFGPGTKVEIKSGGGGSEVQLVESGGGLVQPGGSLKLSCAASGFTFNKYAMNWVRQAPGKGLEWVARIRSKYNNYATYYADSVKDRFTISRDDSKNTAYLQMNNLKTEDTAVYYCVRHGNFGNSYISYWAYWGQGTLVTVSSGGGGSGGGGSGGGGSQTVVTQEPSLTVSPGGTVTLTCGSSTGAVTSGNYPNWVQQKPGQAPRGLIGGTKFLAPGTPARFSGSLLGGKAALTLSGVQPEDEAEYYCVLWYSNRWVFGGGTKLTVL

SEQ ID NO: 351 - protein, 5 aa, Artificial Sequence
  Synthetic peptide
SYAMS

SEQ ID NO: 352 - protein, 17 aa, Artificial Sequence
  Synthetic peptide
AISGSGGRTYYADSVKG

SEQ ID NO: 353 - protein, 11 aa, Artificial Sequence
  Synthetic peptide
HDYSNYPYFDY

SEQ ID NO: 354 - protein, 12 aa, Artificial Sequence
  Synthetic peptide
RASQSVRGSYLA

SEQ ID NO: 355 - protein, 7 aa, Artificial Sequence
  Synthetic peptide
SASSRAT

SEQ ID NO: 356 - protein, 9 aa, Artificial Sequence
  Synthetic peptide
QQYGDSPFT

SEQ ID NO: 357 - protein, 120 aa, Artificial Sequence
  Synthetic peptide
EVQLLESGGGLVQPGGSLRLSCAASGFTFSSYAMSWVRQAPGQGLEWVSAISGSGGRTYYADSVKGRFTISRDNSKNTLYLQMNSLRAEDTAVYYCAKHDYSNYPYFDYWGQGTLVTVSS

SEQ ID NO: 358 - protein, 108 aa, Artificial Sequence
  Synthetic peptide
EIVLTQSPGTLSLSPGERATLSCRASQSVRGSYLAWYQQKPGQAPRLLIYSASSRATGIPDRFSGSGSGTDFTLTISRLEPEDFAVYYCQQYGDSPFTFGPGTKVEIK

SEQ ID NO: 359 - protein, 243 aa, Artificial Sequence
  Synthetic peptide
EVQLLESGGGLVQPGGSLRLSCAASGFTFSSYAMSWVRQAPGQGLEWVSAISGSGGRTYYADSVKGRFTISRDNSKNTLYLQMNSLRAEDTAVYYCAKHDYSNYPYFDYWGQGTLVTVSSGGGGSGGGGSGGGGSEIVLTQSPGTLSLSPGERATLSCRASQSVRGSYLAWYQQKPGQAPRLLIYSASSRATGIPDRFSGSGSGTDFTLTISRLEPEDFAVYYCQQYGDSPFTFGPGTKVEIK

SEQ ID NO: 360 - protein, 498 aa, Artificial Sequence
  Synthetic peptide
EVQLLESGGGLVQPGGSLRLSCAASGFTFSSYAMSWVRQAPGQGLEWVSAISGSGGRTYYADSVKGRFTISRDNSKNTLYLQMNSLRAEDTAVYYCAKHDYSNYPYFDYWGQGTLVTVSSGGGGSGGGGSGGGGSEIVLTQSPGTLSLSPGERATLSCRASQSVRGSYLAWYQQKPGQAPRLLIYSASSRATGIPDRFSGSGSGTDFTLTISRLEPEDFAVYYCQQYGDSPFTFGPGTKVEIKSGGGGSEVQLVESGGGLVQPGGSLKLSCAASGFTFNKYAMNWVRQAPGKGLEWVARIRSKYNNYATYYADSVKDRFTISRDDSKNTAYLQMNNLKTEDTAVYYCVRHGNFGNSYISYWAYWGQGTLVTVSSGGGGSGGGGSGGGGSQTVVTQEPSLTVSPGGTVTLTCGSSTGAVTSGNYPNWVQQKPGQAPRGLIGGTKFLAPGTPARFSGSLLGGKAALTLSGVQPEDEAEYYCVLWYSNRWVFGGGTKLTVL

SEQ ID NO: 361 - protein, 5 aa, Artificial Sequence
  Synthetic peptide
SYAMS

SEQ ID NO: 362 - protein, 17 aa, Artificial Sequence
  Synthetic peptide
AIGDGGGYTYYADSVKG

SEQ ID NO: 363 - protein, 11 aa, Artificial Sequence
  Synthetic peptide
HDYSNYPYFDY

SEQ ID NO: 364 - protein, 12 aa, Artificial Sequence
  Synthetic peptide
RASQGVRSSYFA

SEQ ID NO: 365 - protein, 7 aa, Artificial Sequence
  Synthetic peptide
GASTRAT

SEQ ID NO: 366 - protein, 9 aa, Artificial Sequence
  Synthetic peptide
QQYGSSPPT

SEQ ID NO: 367 - protein, 120 aa, Artificial Sequence
  Synthetic peptide
EVQLLESGGGLVQPGGSLRLSCAASGFTFSSYAMSWVRQAPGKGLEWVSAIGDGGGYTYYADSVKGRFTISRDNSKNTLSLLMNSLRAEDTAVYYCARHDYSNYPYFDYWGQGTLVTVSS

SEQ ID NO: 368 - protein, 108 aa, Artificial Sequence
  Synthetic peptide
EIVLTQSPGTLSLSPGERATLSCRASQGVRSSYFAWYQQKPGQAPRLLIYGASTRATGIPARFSGSGSGTDFTLTISRLEPEDFAVYYCQQYGSSPPTFGQGTKVEIK

SEQ ID NO: 369 - protein, 243 aa, Artificial Sequence
  Synthetic peptide
EVQLLESGGGLVQPGGSLRLSCAASGFTFSSYAMSWVRQAPGKGLEWVSAIGDGGGYTYYADSVKGRFTISRDNSKNTLSLLMNSLRAEDTAVYYCARHDYSNYPYFDYWGQGTLVTVSSGGGGSGGGGSGGGGSEIVLTQSPGTLSLSPGERATLSCRASQGVRSSYFAWYQQKPGQAPRLLIYGASTRATGIPARFSGSGSGTDFTLTISRLEPEDFAVYYCQQYGSSPPTFGQGTKVEIK

SEQ ID NO: 370 - protein, 498 aa, Artificial Sequence
  Synthetic peptide
EVQLLESGGGLVQPGGSLRLSCAASGFTFSSYAMSWVRQAPGKGLEWVSAIGDGGGYTYYADSVKGRFTISRDNSKNTLSLLMNSLRAEDTAVYYCARHDYSNYPYFDYWGQGTLVTVSSGGGGSGGGGSGGGGSEIVLTQSPGTLSLSPGERATLSCRASQGVRSSYFAWYQQKPGQAPRLLIYGASTRATGIPARFSGSGSGTDFTLTISRLEPEDFAVYYCQQYGSSPPTFGQGTKVEIKSGGGGSEVQLVESGGGLVQPGGSLKLSCAASGFTFNKYAMNWVRQAPGKGLEWVARIRSKYNNYATYYADSVKDRFTISRDDSKNTAYLQMNNLKTEDTAVYYCVRHGNFGNSYISYWAYWGQGTLVTVSSGGGGSGGGGSGGGGSQTVVTQEPSLTVSPGGTVTLTCGSSTGAVTSGNYPNWVQQKPGQAPRGLIGGTKFLAPGTPARFSGSLLGGKAALTLSGVQPEDEAEYYCVLWYSNRWVFGGGTKLTVL

SEQ ID NO: 371 - protein, 5 aa, Artificial Sequence
  Synthetic peptide
SYAMS

SEQ ID NO: 372 - protein, 17 aa, Artificial Sequence
  Synthetic peptide
AISGSGGRTFYADSVEG

SEQ ID NO: 373 - protein, 11 aa, Artificial Sequence
  Synthetic peptide
HDYSNYPYFDY

SEQ ID NO: 374 - protein, 12 aa, Artificial Sequence
  Synthetic peptide
RASQSIRSNYLA

SEQ ID NO: 375 - protein, 7 aa, Artificial Sequence
  Synthetic peptide
GASSRAT

SEQ ID NO: 376 - protein, 9 aa, Artificial Sequence
  Synthetic peptide
QQYGSSPPS

SEQ ID NO: 377 - protein, 120 aa, Artificial Sequence
  Synthetic peptide
EVQLLESGGGVVQPGRSLRLSCAASGFTFSSYAMSWVRQAPGKGLEWVSAISGSGGRTFYADSVEGRFTISRDNSKNTLYLQMNSLRAEDTAVYYCAKHDYSNYPYFDYWGQGTLVTVSS

SEQ ID NO: 378 - protein, 108 aa, Artificial Sequence
  Synthetic peptide
EIVLTQSPGTLSLSPGERATLSCRASQSIRSNYLAWYQQKPGQAPRLLIYGASSRATGIPDRFSGSGSGTDFTLTISRLEPEDFAVYYCQQYGSSPPSFGQGTKVEIK

SEQ ID NO: 379 - protein, 243 aa, Artificial Sequence
  Synthetic peptide
EVQLLESGGGVVQPGRSLRLSCAASGFTFSSYAMSWVRQAPGKGLEWVSAISGSGGRTFYADSVEGRFTISRDNSKNTLYLQMNSLRAEDTAVYYCAKHDYSNYPYFDYWGQGTLVTVSSGGGGSGGGGSGGGGSEIVLTQSPGTLSLSPGERATLSCRASQSIRSNYLAWYQQKPGQAPRLLIYGASSRATGIPDRFSGSGSGTDFTLTISRLEPEDFAVYYCQQYGSSPPSFGQGTKVEIK

SEQ ID NO: 380 - protein, 498 aa, Artificial Sequence
  Synthetic peptide
EVQLLESGGGVVQPGRSLRLSCAASGFTFSSYAMSWVRQAPGKGLEWVSAISGSGGRTFYADSVEGRFTISRDNSKNTLYLQMNSLRAEDTAVYYCAKHDYSNYPYFDYWGQGTLVTVSSGGGGSGGGGSGGGGSEIVLTQSPGTLSLSPGERATLSCRASQSIRSNYLAWYQQKPGQAPRLLIYGASSRATGIPDRFSGSGSGTDFTLTISRLEPEDFAVYYCQQYGSSPPSFGQGTKVEIKSGGGGSEVQLVESGGGLVQPGGSLKLSCAASGFTFNKYAMNWVRQAPGKGLEWVARIRSKYNNYATYYADSVKDRFTISRDDSKNTAYLQMNNLKTEDTAVYYCVRHGNFGNSYISYWAYWGQGTLVTVSSGGGGSGGGGSGGGGSQTVVTQEPSLTVSPGGTVTLTCGSSTGAVTSGNYPNWVQQKPGQAPRGLIGGTKFLAPGTPARFSGSLLGGKAALTLSGVQPEDEAEYYCVLWYSNRWVFGGGTKLTVL

SEQ ID NO: 381 - protein, 5 aa, Artificial Sequence
  Synthetic peptide
SYAMS

SEQ ID NO: 382 - protein, 17 aa, Artificial Sequence
  Synthetic peptide
AISGSGGGTFYADSVEG

SEQ ID NO: 383 - protein, 11 aa, Artificial Sequence
  Synthetic peptide
HDYSNYPYFDY

SEQ ID NO: 384 - protein, 12 aa, Artificial Sequence
  Synthetic peptide
RASQSVRSSYLA

SEQ ID NO: 385 - protein, 7 aa, Artificial Sequence
  Synthetic peptide
GASSRAT

SEQ ID NO: 386 - protein, 9 aa, Artificial Sequence
  Synthetic peptide
QQYGDLPFT

SEQ ID NO: 387 - protein, 120 aa, Artificial Sequence
  Synthetic peptide
EVQLLESGGGVVQPGRSLRLSCAASGFTFSSYAMSWVRQAPGKGLEWVSAISGSGGGTFYADSVEGRFTISRDNSKNTLYLQMNSLRAEDTAVYYCARHDYSNYPYFDYWGLGTLVTVSS

SEQ ID NO: 388 - protein, 108 aa, Artificial Sequence
  Synthetic peptide
EIVLTQSPGTLSLSPGERATLSCRASQSVRSSYLAWYQQKPGQAPRLLIYGASSRATGIPDRFSGSGSGTDFTLTISRLEPEDFAVYSCQQYGDLPFTFGPGTKVEIK

SEQ ID NO: 389 - protein, 243 aa, Artificial Sequence
  Synthetic peptide
EVQLLESGGGVVQPGRSLRLSCAASGFTFSSYAMSWVRQAPGKGLEWVSAISGSGGGTFYADSVEGRFTISRDNSKNTLYLQMNSLRAEDTAVYYCARHDYSNYPYFDYWGLGTLVTVSSGGGGSGGGGSGGGGSEIVLTQSPGTLSLSPGERATLSCRASQSVRSSYLAWYQQKPGQAPRLLIYGASSRATGIPDRFSGSGSGTDFTLTISRLEPEDFAVYSCQQYGDLPFTFGPGTKVEIK

SEQ ID NO: 390 - protein, 498 aa, Artificial Sequence
  Synthetic peptide
EVQLLESGGGVVQPGRSLRLSCAASGFTFSSYAMSWVRQAPGKGLEWVSAISGSGGGTFYADSVEGRFTISRDNSKNTLYLQMNSLRAEDTAVYYCARHDYSNYPYFDYWGLGTLVTVSSGGGGSGGGGSGGGGSEIVLTQSPGTLSLSPGERATLSCRASQSVRSSYLAWYQQKPGQAPRLLIYGASSRATGIPDRFSGSGSGTDFTLTISRLEPEDFAVYSCQQYGDLPFTFGPGTKVEIKSGGGGSEVQLVESGGGLVQPGGSLKLSCAASGFTFNKYAMNWVRQAPGKGLEWVARIRSKYNNYATYYADSVKDRFTISRDDSKNTAYLQMNNLKTEDTAVYYCVRHGNFGNSYISYWAYWGQGTLVTVSSGGGGSGGGGSGGGGSQTVVTQEPSLTVSPGGTVTLTCGSSTGAVTSGNYPNWVQQKPGQAPRGLIGGTKFLAPGTPARFSGSLLGGKAALTLSGVQPEDEAEYYCVLWYSNRWVFGGGTKLTVL

SEQ ID NO: 391 - protein, 5 aa, Artificial Sequence
  Synthetic peptide
SYAMS

SEQ ID NO: 392 - protein, 17 aa, Artificial Sequence
  Synthetic peptide
AISGSGGRTFYADSVEG

SEQ ID NO: 393 - protein, 11 aa, Artificial Sequence
  Synthetic peptide
HDYSNYPYFDY

SEQ ID NO: 394 - protein, 12 aa, Artificial Sequence
  Synthetic peptide
RASQSIRSSYLA

SEQ ID NO: 395 - protein, 7 aa, Artificial Sequence
  Synthetic peptide
GASSRAT

SEQ ID NO: 396 - protein, 9 aa, Artificial Sequence
  Synthetic peptide
QQYGDLPFT

SEQ ID NO: 397 - protein, 120 aa, Artificial Sequence; identical to SEQ ID NO: 157
  Synthetic peptide

SEQ ID NO: 398 - protein, 108 aa, Artificial Sequence
  Synthetic peptide
EIVLTQSPGTLSLSPGERATLSCRASQSIRSSYLAWYQQKPGQAPRLLIYGASSRATGIPDRFSGSGSGTDFTLTISRLEPEDFAVYYCQQYGDLPFTFGPGTKVDIK

SEQ ID NO: 399 - protein, 243 aa, Artificial Sequence
  Synthetic peptide
EVQLLESGGGMVQPGGSLRLSCAASGFTFSSYAMSWVRQAPGKGLEWVSAISGSGGRTFYADSVEGRFTISRDNSKNTLYLQMNSLRAEDTAVYYCAKHDYSNYPYFDYWGQGTLVTVSSGGGGSGGGGSGGGGSEIVLTQSPGTLSLSPGERATLSCRASQSIRSSYLAWYQQKPGQAPRLLIYGASSRATGIPDRFSGSGSGTDFTLTISRLEPEDFAVYYCQQYGDLPFTFGPGTKVDIK

SEQ ID NO: 400 - protein, 498 aa, Artificial Sequence
  Synthetic peptide
EVQLLESGGGMVQPGGSLRLSCAASGFTFSSYAMSWVRQAPGKGLEWVSAISGSGGRTFYADSVEGRFTISRDNSKNTLYLQMNSLRAEDTAVYYCAKHDYSNYPYFDYWGQGTLVTVSSGGGGSGGGGSGGGGSEIVLTQSPGTLSLSPGERATLSCRASQSIRSSYLAWYQQKPGQAPRLLIYGASSRATGIPDRFSGSGSGTDFTLTISRLEPEDFAVYYCQQYGDLPFTFGPGTKVDIKSGGGGSEVQLVESGGGLVQPGGSLKLSCAASGFTFNKYAMNWVRQAPGKGLEWVARIRSKYNNYATYYADSVKDRFTISRDDSKNTAYLQMNNLKTEDTAVYYCVRHGNFGNSYISYWAYWGQGTLVTVSSGGGGSGGGGSGGGGSQTVVTQEPSLTVSPGGTVTLTCGSSTGAVTSGNYPNWVQQKPGQAPRGLIGGTKFLAPGTPARFSGSLLGGKAALTLSGVQPEDEAEYYCVLWYSNRWVFGGGTKLTVL

SEQ ID NO: 401 - protein, 5 aa, Artificial Sequence
  Synthetic peptide
SYAMS

SEQ ID NO: 402 - protein, 17 aa, Artificial Sequence
  Synthetic peptide
AISGSGGRTFYADSVEG

SEQ ID NO: 403 - protein, 11 aa, Artificial Sequence
  Synthetic peptide
HDYSNYPYFDY

SEQ ID NO: 404 - protein, 12 aa, Artificial Sequence
  Synthetic peptide
RASQSVRSSYLA

SEQ ID NO: 405 - protein, 7 aa, Artificial Sequence
  Synthetic peptide
GASSRAT

SEQ ID NO: 406 - protein, 9 aa, Artificial Sequence
  Synthetic peptide
QQYGDLPFT

SEQ ID NO: 407 - protein, 120 aa, Artificial Sequence; identical to SEQ ID NO: 317
  Synthetic peptide

SEQ ID NO: 408 - protein, 108 aa, Artificial Sequence
  Synthetic peptide
EIVLTQSPGTLSLSPGERATLSCRASQSVRSSYLAWYQQKPGQAPRLLIYGASSRATGIPDRFSGSGSGTDFTLTISRLEPEDFAVYYCQQYGDLPFTFGPGTKVDIK

SEQ ID NO: 409 - protein, 243 aa, Artificial Sequence
  Synthetic peptide
EVQLLESGGGMVQPGGSLRLSCAASGFTFSSYAMSWVRQAPGKGLEWVSAISGSGGRTFYADSVEGRFTISRDNSKNTLYLQMNSLRAEDTAVYYCTKHDYSNYPYFDYWGQGTLVTVSSGGGGSGGGGSGGGGSEIVLTQSPGTLSLSPGERATLSCRASQSVRSSYLAWYQQKPGQAPRLLIYGASSRATGIPDRFSGSGSGTDFTLTISRLEPEDFAVYYCQQYGDLPFTFGPGTKVDIK

SEQ ID NO: 410 - protein, 498 aa, Artificial Sequence
  Synthetic peptide
EVQLLESGGGMVQPGGSLRLSCAASGFTFSSYAMSWVRQAPGKGLEWVSAISGSGGRTFYADSVEGRFTISRDNSKNTLYLQMNSLRAEDTAVYYCTKHDYSNYPYFDYWGQGTLVTVSSGGGGSGGGGSGGGGSEIVLTQSPGTLSLSPGERATLSCRASQSVRSSYLAWYQQKPGQAPRLLIYGASSRATGIPDRFSGSGSGTDFTLTISRLEPEDFAVYYCQQYGDLPFTFGPGTKVDIKSGGGGSEVQLVESGGGLVQPGGSLKLSCAASGFTFNKYAMNWVRQAPGKGLEWVARIRSKYNNYATYYADSVKDRFTISRDDSKNTAYLQMNNLKTEDTAVYYCVRHGNFGNSYISYWAYWGQGTLVTVSSGGGGSGGGGSGGGGSQTVVTQEPSLTVSPGGTVTLTCGSSTGAVTSGNYPNWVQQKPGQAPRGLIGGTKFLAPGTPARFSGSLLGGKAALTLSGVQPEDEAEYYCVLWYSNRWVFGGGTKLTVL

SEQ ID NO: 411 - protein, 5 aa, Artificial Sequence
  Synthetic peptide
TYAMS

SEQ ID NO: 412 - protein, 17 aa, Artificial Sequence
  Synthetic peptide
LISGSGGRTYYADSVKG

SEQ ID NO: 413 - protein, 11 aa, Artificial Sequence
  Synthetic peptide
HDYSNYPYFDY

SEQ ID NO: 414 - protein, 12 aa, Artificial Sequence
  Synthetic peptide
RASQGVRSSYLA

SEQ ID NO: 415 - protein, 7 aa, Artificial Sequence
  Synthetic peptide
GASSRAT

SEQ ID NO: 416 - protein, 9 aa, Artificial Sequence
  Synthetic peptide
QQYGSSPPT

SEQ ID NO: 417 - protein, 120 aa, Artificial Sequence; identical to SEQ ID NO: 197
  Synthetic peptide

SEQ ID NO: 418 - protein, 108 aa, Artificial Sequence
  Synthetic peptide
EIVLTQSPGTLSLSPGERATLSCRASQGVRSSYLAWYQQKPGQAPRLLIYGASSRATGIPDRFSGSGSGTDFTLTINRLEPEDFAVYYCQQYGSSPPTFGGGTKVDIK

SEQ ID NO: 419 - protein, 243 aa, Artificial Sequence
  Synthetic peptide
EVQLLESGGGLVQPGGSLRLSCAASGFTFSTYAMSWVRQAPGKGLEWVSLISGSGGRTYYADSVKGRFTISRDNSKNTLYLQMNSLRAEDTAVYYCAKHDYSNYPYFDYWGQGTLVTVSSGGGGSGGGGSGGGGSEIVLTQSPGTLSLSPGERATLSCRASQGVRSSYLAWYQQKPGQAPRLLIYGASSRATGIPDRFSGSGSGTDFTLTINRLEPEDFAVYYCQQYGSSPPTFGGGTKVDIK

SEQ ID NO: 420 - protein, 498 aa, Artificial Sequence
  Synthetic peptide
EVQLLESGGGLVQPGGSLRLSCAASGFTFSTYAMSWVRQAPGKGLEWVSLISGSGGRTYYADSVKGRFTISRDNSKNTLYLQMNSLRAEDTAVYYCAKHDYSNYPYFDYWGQGTLVTVSSGGGGSGGGGSGGGGSEIVLTQSPGTLSLSPGERATLSCRASQGVRSSYLAWYQQKPGQAPRLLIYGASSRATGIPDRFSGSGSGTDFTLTINRLEPEDFAVYYCQQYGSSPPTFGGGTKVDIKSGGGGSEVQLVESGGGLVQPGGSLKLSCAASGFTFNKYAMNWVRQAPGKGLEWVARIRSKYNNYATYYADSVKDRFTISRDDSKNTAYLQMNNLKTEDTAVYYCVRHGNFGNSYISYWAYWGQGTLVTVSSGGGGSGGGGSGGGGSQTVVTQEPSLTVSPGGTVTLTCGSSTGAVTSGNYPNWVQQKPGQAPRGLIGGTKFLAPGTPARFSGSLLGGKAALTLSGVQPEDEAEYYCVLWYSNRWVFGGGTKLTVL

SEQ ID NO: 421 - protein, 5 aa, Artificial Sequence
  Synthetic peptide
SYAMS

SEQ ID NO: 422 - protein, 17 aa, Artificial Sequence
  Synthetic peptide
AISGSGGRTFYADSVEG

SEQ ID NO: 423 - protein, 11 aa, Artificial Sequence
  Synthetic peptide
HDYSNYPYFDY

SEQ ID NO: 424 - protein, 12 aa, Artificial Sequence
  Synthetic peptide
RASQSVRSNYLA

SEQ ID NO: 425 - protein, 7 aa, Artificial Sequence
  Synthetic peptide
GASSRAT

SEQ ID NO: 426 - protein, 9 aa, Artificial Sequence
  Synthetic peptide
QQYGSSPPT

SEQ ID NO: 427 - protein, 120 aa, Artificial Sequence; identical to SEQ ID NO: 377
  Synthetic peptide

SEQ ID NO: 428 - protein, 108 aa, Artificial Sequence
  Synthetic peptide
EIVLTQSPGTLSLSPGERATLSCRASQSVRSNYLAWYQQKPGQAPRLLIYGASSRATGIPDRFSGSGSGTDFTLTINRLEPEDFAVYYCQQYGSSPPTFGGGTKVDIK

SEQ ID NO: 429 - protein, 243 aa, Artificial Sequence
  Synthetic peptide
EVQLLESGGGVVQPGRSLRLSCAASGFTFSSYAMSWVRQAPGKGLEWVSAISGSGGRTFYADSVEGRFTISRDNSKNTLYLQMNSLRAEDTAVYYCAKHDYSNYPYFDYWGQGTLVTVSSGGGGSGGGGSGGGGSEIVLTQSPGTLSLSPGERATLSCRASQSVRSNYLAWYQQKPGQAPRLLIYGASSRATGIPDRFSGSGSGTDFTLTINRLEPEDFAVYYCQQYGSSPPTFGGGTKVDIK

SEQ ID NO: 430 - protein, 498 aa, Artificial Sequence
  Synthetic peptide
EVQLLESGGGVVQPGRSLRLSCAASGFTFSSYAMSWVRQAPGKGLEWVSAISGSGGRTFYADSVEGRFTISRDNSKNTLYLQMNSLRAEDTAVYYCAKHDYSNYPYFDYWGQGTLVTVSSGGGGSGGGGSGGGGSEIVLTQSPGTLSLSPGERATLSCRASQSVRSNYLAWYQQKPGQAPRLLIYGASSRATGIPDRFSGSGSGTDFTLTINRLEPEDFAVYYCQQYGSSPPTFGGGTKVDIKSGGGGSEVQLVESGGGLVQPGGSLKLSCAASGFTFNKYAMNWVRQAPGKGLEWVARIRSKYNNYATYYADSVKDRFTISRDDSKNTAYLQMNNLKTEDTAVYYCVRHGNFGNSYISYWAYWGQGTLVTVSSGGGGSGGGGSGGGGSQTVVTQEPSLTVSPGGTVTLTCGSSTGAVTSGNYPNWVQQKPGQAPRGLIGGTKFLAPGTPARFSGSLLGGKAALTLSGVQPEDEAEYYCVLWYSNRWVFGGGTKLTVL

SEQ ID NO: 431 - protein, 5 aa, Artificial Sequence
  Synthetic peptide
SYAMS

SEQ ID NO: 432 - protein, 17 aa, Artificial Sequence
  Synthetic peptide
VISDSGGITDFADSVKG

SEQ ID NO: 433 - protein, 11 aa, Artificial Sequence
  Synthetic peptide
HDYSNYFFFDY

SEQ ID NO: 434 - protein, 11 aa, Artificial Sequence
  Synthetic peptide
RASQDISNYLN

SEQ ID NO: 435 - protein, 7 aa, Artificial Sequence
  Synthetic peptide
AASSLQS

SEQ ID NO: 436 - protein, 9 aa, Artificial Sequence
  Synthetic peptide
QQSYISPPT

SEQ ID NO: 437 - protein, 120 aa, Artificial Sequence
  Synthetic peptide
EVQLLESGGGLVQPGGSLRLSCAASGFTFSSYAMSWVRQAPGKGLEWVSVISDSGGITDFADSVKGRFIISRDNSRNTLYLQMNSLRAEDTAVYFCARHDYSNYFFFDYWGQGTLVTVSS

SEQ ID NO: 438 - protein, 107 aa, Artificial Sequence
  Synthetic peptide
DIQMTQSPSSLSASVGDRVTITCRASQDISNYLNWYQQKSGKAPELLIYAASSLQSGVPSRFSGSGSGTDFTLTISSLQPEDFATYYCQQSYISPPTFGQGTKVEIK

SEQ ID NO: 439 - protein, 242 aa, Artificial Sequence
  Synthetic peptide
EVQLLESGGGLVQPGGSLRLSCAASGFTFSSYAMSWVRQAPGKGLEWVSVISDSGGITDFADSVKGRFIISRDNSRNTLYLQMNSLRAEDTAVYFCARHDYSNYFFFDYWGQGTLVTVSSGGGGSGGGGSGGGGSDIQMTQSPSSLSASVGDRVTITCRASQDISNYLNWYQQKSGKAPELLIYAASSLQSGVPSRFSGSGSGTDFTLTISSLQPEDFATYYCQQSYISPPTFGQGTKVEIK

SEQ ID NO: 440 - protein, 497 aa, Artificial Sequence
  Synthetic peptide
EVQLLESGGGLVQPGGSLRLSCAASGFTFSSYAMSWVRQAPGKGLEWVSVISDSGGITDFADSVKGRFIISRDNSRNTLYLQMNSLRAEDTAVYFCARHDYSNYFFFDYWGQGTLVTVSSGGGGSGGGGSGGGGSDIQMTQSPSSLSASVGDRVTITCRASQDISNYLNWYQQKSGKAPELLIYAASSLQSGVPSRFSGSGSGTDFTLTISSLQPEDFATYYCQQSYISPPTFGQGTKVEIKSGGGGSEVQLVESGGGLVQPGGSLKLSCAASGFTFNKYAMNWVRQAPGKGLEWVARIRSKYNNYATYYADSVKDRFTISRDDSKNTAYLQMNNLKTEDTAVYYCVRHGNFGNSYISYWAYWGQGTLVTVSSGGGGSGGGGSGGGGSQTVVTQEPSLTVSPGGTVTLTCGSSTGAVTSGNYPNWVQQKPGQAPRGLIGGTKFLAPGTPARFSGSLLGGKAALTLSGVQPEDEAEYYCVLWYSNRWVFGGGTKLTVL

SEQ ID NO: 441 - protein, 5 aa, Artificial Sequence
  Synthetic peptide
SYAMS

SEQ ID NO: 442 - protein, 17 aa, Artificial Sequence
  Synthetic peptide
VISDSGGITDFADSVKG

SEQ ID NO: 443 - protein, 11 aa, Artificial Sequence
  Synthetic peptide
HDYSNYFFFDY

SEQ ID NO: 444 - protein, 11 aa, Artificial Sequence
  Synthetic peptide
RASQSISSYLN

SEQ ID NO: 445 - protein, 7 aa, Artificial Sequence
  Synthetic peptide
AASSLQS

SEQ ID NO: 446 - protein, 9 aa, Artificial Sequence
  Synthetic peptide
QQSYISPPT

SEQ ID NO: 447 - protein, 120 aa, Artificial Sequence
  Synthetic peptide
EVQLLESGGGVVQPGRSLRLSCAASGFTFSSYAMSWVRQAPGKGLEWVSVISDSGGITDFADSVKGRFTISRDNSRNTLYLQMNSLRAEDTAVYFCARHDYSNYFFFDYWGQGTLVTVSS

SEQ ID NO: 448 - protein, 107 aa, Artificial Sequence
  Synthetic peptide
DIQMTQSPSSLSASVGDRVTITCRASQSISSYLNWYQQKPGKAPKLLIYAASSLQSGVPSRFSGSGSGTDFTLTISSLQPEDFATYYCQQSYISPPTFGQGTKVEIK

SEQ ID NO: 449 - protein, 242 aa, Artificial Sequence
  Synthetic peptide
EVQLLESGGGVVQPGRSLRLSCAASGFTFSSYAMSWVRQAPGKGLEWVSVISDSGGITDFADSVKGRFTISRDNSRNTLYLQMNSLRAEDTAVYFCARHDYSNYFFFDYWGQGTLVTVSSGGGGSGGGGSGGGGSDIQMTQSPSSLSASVGDRVTITCRASQSISSYLNWYQQKPGKAPKLLIYAASSLQSGVPSRFSGSGSGTDFTLTISSLQPEDFATYYCQQSYISPPTFGQGTKVEIK

SEQ ID NO: 450 - protein, 497 aa, Artificial Sequence
  Synthetic peptide
EVQLLESGGGVVQPGRSLRLSCAASGFTFSSYAMSWVRQAPGKGLEWVSVISDSGGITDFADSVKGRFTISRDNSRNTLYLQMNSLRAEDTAVYFCARHDYSNYFFFDYWGQGTLVTVSSGGGGSGGGGSGGGGSDIQMTQSPSSLSASVGDRVTITCRASQSISSYLNWYQQKPGKAPKLLIYAASSLQSGVPSRFSGSGSGTDFTLTISSLQPEDFATYYCQQSYISPPTFGQGTKVEIKSGGGGSEVQLVESGGGLVQPGGSLKLSCAASGFTFNKYAMNWVRQAPGKGLEWVARIRSKYNNYATYYADSVKDRFTISRDDSKNTAYLQMNNLKTEDTAVYYCVRHGNFGNSYISYWAYWGQGTLVTVSSGGGGSGGGGSGGGGSQTVVTQEPSLTVSPGGTVTLTCGSSTGAVTSGNYPNWVQQKPGQAPRGLIGGTKFLAPGTPARFSGSLLGGKAALTLSGVQPEDEAEYYCVLWYSNRWVFGGGTKLTVL

SEQ ID NO: 451 - protein, 5 aa, Artificial Sequence
  Synthetic peptide
SYAMS

SEQ ID NO: 452 - protein, 17 aa, Artificial Sequence
  Synthetic peptide
VISGSGGRTDYADSVKG

SEQ ID NO: 453 - protein, 11 aa, Artificial Sequence
  Synthetic peptide
HDYSNRFYFDY

SEQ ID NO: 454 - protein, 11 aa, Artificial Sequence
  Synthetic peptide
RASQSISSYLN

SEQ ID NO: 455 - protein, 7 aa, Artificial Sequence
  Synthetic peptide
AASSLQS

SEQ ID NO: 456 - protein, 9 aa, Artificial Sequence
  Synthetic peptide
QQSYSAPPT

SEQ ID NO: 457 - protein, 120 aa, Artificial Sequence
  Synthetic peptide
EVQLLESGGGLVQPGGSLRLSCAASGFTFSSYAMSWVRQVPGKGLEWVSVISGSGGRTDYADSVKGRFTISRDNSKNTLYLQMNSLRAEDTAVYYCARHDYSNRFYFDYWGQGTLVTVSS

SEQ ID NO: 458 - protein, 107 aa, Artificial Sequence
  Synthetic peptide
DIQMTQSPSSLSASVGDRVSITCRASQSISSYLNWYQQKPGKAPKLLIYAASSLQSGVPSRFSGSGSGTDFTLTISSLQPEDFATYYCQQSYSAPPTFGGGTKVEIK

SEQ ID NO: 459 - protein, 242 aa, Artificial Sequence
  Synthetic peptide
EVQLLESGGGLVQPGGSLRLSCAASGFTFSSYAMSWVRQVPGKGLEWVSVISGSGGRTDYADSVKGRFTISRDNSKNTLYLQMNSLRAEDTAVYYCARHDYSNRFYFDYWGQGTLVTVSSGGGGSGGGGSGGGGSDIQMTQSPSSLSASVGDRVSITCRASQSISSYLNWYQQKPGKAPKLLIYAASSLQSGVPSRFSGSGSGTDFTLTISSLQPEDFATYYCQQSYSAPPTFGGGTKVEIK

SEQ ID NO: 460 - protein, 497 aa, Artificial Sequence
  Synthetic peptide
EVQLLESGGGLVQPGGSLRLSCAASGFTFSSYAMSWVRQVPGKGLEWVSVISGSGGRTDYADSVKGRFTISRDNSKNTLYLQMNSLRAEDTAVYYCARHDYSNRFYFDYWGQGTLVTVSSGGGGSGGGGSGGGGSDIQMTQSPSSLSASVGDRVSITCRASQSISSYLNWYQQKPGKAPKLLIYAASSLQSGVPSRFSGSGSGTDFTLTISSLQPEDFATYYCQQSYSAPPTFGGGTKVEIKSGGGGSEVQLVESGGGLVQPGGSLKLSCAASGFTFNKYAMNWVRQAPGKGLEWVARIRSKYNNYATYYADSVKDRFTISRDDSKNTAYLQMNNLKTEDTAVYYCVRHGNFGNSYISYWAYWGQGTLVTVSSGGGGSGGGGSGGGGSQTVVTQEPSLTVSPGGTVTLTCGSSTGAVTSGNYPNWVQQKPGQAPRGLIGGTKFLAPGTPARFSGSLLGGKAALTLSGVQPEDEAEYYCVLWYSNRWVFGGGTKLTVL

SEQ ID NO: 461 - protein, 5 aa, Artificial Sequence
  Synthetic peptide
SYAMS

SEQ ID NO: 462 - protein, 17 aa, Artificial Sequence
  Synthetic peptide
VISDSGGITDYADSVKG

SEQ ID NO: 463 - protein, 11 aa, Artificial Sequence
  Synthetic peptide
HDYSNRYYFDY

SEQ ID NO: 464 - protein, 11 aa, Artificial Sequence
  Synthetic peptide
RASQSISSYLN

SEQ ID NO: 465 - protein, 7 aa, Artificial Sequence
  Synthetic peptide
AASSLQS

SEQ ID NO: 466 - protein, 9 aa, Artificial Sequence
  Synthetic peptide
QQSYSTPLT

SEQ ID NO: 467 - protein, 120 aa, Artificial Sequence
  Synthetic peptide
EVQLLESGGGLVQPGGSLRLSCAASGFTFSSYAMSWVRQAPGKGLEWVSVISDSGGITDYADSVKGRFTISRDNSKNTLYLQMNSLRAEDRAVYYCARHDYSNRYYFDYWGQGTLVTVSS

SEQ ID NO: 468 - protein, 107 aa, Artificial Sequence [sequence omitted]

SEQ ID NO: 469 - protein, 242 aa, Artificial Sequence
  Synthetic peptide
EVQLLESGGGLVQPGGSLRLSCAASGFTFSSYAMSWVRQAPGKGLEWVSVISDSGGITDYADSVKGRFTISRDNSKNTLYLQMNSLRAEDRAVYYCARHDYSNRYYFDYWGQGTLVTVSSGGGGSGGGGSGGGGSDIQMTQSPSSLSASVGDRVTITCRASQSISSYLNWYQQKPGKAPKLLIYAASSLQSGVPSRFSGSGSGTDFTLTISSLQPEDFATYYCQQSYSTPLTFGGGTKVEIK

SEQ ID NO: 470 - protein, 497 aa, Artificial Sequence
  Synthetic peptide
EVQLLESGGGLVQPGGSLRLSCAASGFTFSSYAMSWVRQAPGKGLEWVSVISDSGGITDYADSVKGRFTISRDNSKNTLYLQMNSLRAEDRAVYYCARHDYSNRYYFDYWGQGTLVTVSSGGGGSGGGGSGGGGSDIQMTQSPSSLSASVGDRVTITCRASQSISSYLNWYQQKPGKAPKLLIYAASSLQSGVPSRFSGSGSGTDFTLTISSLQPEDFATYYCQQSYSTPLTFGGGTKVEIKSGGGGSEVQLVESGGGLVQPGGSLKLSCAASGFTFNKYAMNWVRQAPGKGLEWVARIRSKYNNYATYYADSVKDRFTISRDDSKNTAYLQMNNLKTEDTAVYYCVRHGNFGNSYISYWAYWGQGTLVTVSSGGGGSGGGGSGGGGSQTVVTQEPSLTVSPGGTVTLTCGSSTGAVTSGNYPNWVQQKPGQAPRGLIGGTKFLAPGTPARFSGSLLGGKAALTLSGVQPEDEAEYYCVLWYSNRWVFGGGTKLTVL

SEQ ID NO: 471 - protein, 5 aa, Artificial Sequence
  Synthetic peptide
SYAMS

SEQ ID NO: 472 - protein, 17 aa, Artificial Sequence
  Synthetic peptide
VISDSGGITDFADSVKG

SEQ ID NO: 473 - protein, 11 aa, Artificial Sequence
  Synthetic peptide
HDYSNYFFFDY

SEQ ID NO: 474 - protein, 11 aa, Artificial Sequence
  Synthetic peptide
RASQGISNYLA

SEQ ID NO: 475 - protein, 7 aa, Artificial Sequence
  Synthetic peptide
AASILQS

SEQ ID NO: 476 - protein, 9 aa, Artificial Sequence
  Synthetic peptide
QQYFAYPIT

SEQ ID NO: 477 - protein, 120 aa, Artificial Sequence
  Synthetic peptide
EVQLLESGGGLVQPGGSLRLSCAASGFTFSSYAMSWVRQAPGKGLEWVSVISDSGGITDFADSVKGRFTISRDNSRNTLYLQMNSLRAEDTAVYFCARHDYSNYFFFDYWGQGTLVTVSS

SEQ ID NO: 478 - protein, 107 aa, Artificial Sequence
  Synthetic peptide
DIQMTQSPSSLSASVGDRVTITCRASQGISNYLAWYQQKPGKVPKLLIYAASILQSGVPSKFSGSGSGTDFTLTISSLQPEDFAIYYCQQYFAYPITFGQGTRLEIK

SEQ ID NO: 479 - protein, 242 aa, Artificial Sequence
  Synthetic peptide
EVQLLESGGGLVQPGGSLRLSCAASGFTFSSYAMSWVRQAPGKGLEWVSVISDSGGITDFADSVKGRFTISRDNSRNTLYLQMNSLRAEDTAVYFCARHDYSNYFFFDYWGQGTLVTVSSGGGGSGGGGSGGGGSDIQMTQSPSSLSASVGDRVTITCRASQGISNYLAWYQQKPGKVPKLLIYAASILQSGVPSKFSGSGSGTDFTLTISSLQPEDFAIYYCQQYFAYPITFGQGTRLEIK

SEQ ID NO: 480 - protein, 497 aa, Artificial Sequence
  Synthetic peptide
EVQLLESGGGLVQPGGSLRLSCAASGFTFSSYAMSWVRQAPGKGLEWVSVISDSGGITDFADSVKGRFTISRDNSRNTLYLQMNSLRAEDTAVYFCARHDYSNYFFFDYWGQGTLVTVSSGGGGSGGGGSGGGGSDIQMTQSPSSLSASVGDRVTITCRASQGISNYLAWYQQKPGKVPKLLIYAASILQSGVPSKFSGSGSGTDFTLTISSLQPEDFAIYYCQQYFAYPITFGQGTRLEIKSGGGGSEVQLVESGGGLVQPGGSLKLSCAASGFTFNKYAMNWVRQAPGKGLEWVARIRSKYNNYATYYADSVKDRFTISRDDSKNTAYLQMNNLKTEDTAVYYCVRHGNFGNSYISYWAYWGQGTLVTVSSGGGGSGGGGSGGGGSQTVVTQEPSLTVSPGGTVTLTCGSSTGAVTSGNYPNWVQQKPGQAPRGLIGGTKFLAPGTPARFSGSLLGGKAALTLSGVQPEDEAEYYCVLWYSNRWVFGGGTKLTVL

SEQ ID NO: 481 - protein, 5 aa, Artificial Sequence
  Synthetic peptide
SYAMS

SEQ ID NO: 482 - protein, 17 aa, Artificial Sequence
  Synthetic peptide
VISDSGGITDFADSVKG

SEQ ID NO: 483 - protein, 11 aa, Artificial Sequence
  Synthetic peptide
HDYSNYFFFDY

SEQ ID NO: 484 - protein, 11 aa, Artificial Sequence
  Synthetic peptide
RASQSISSYLN

SEQ ID NO: 485 - protein, 7 aa, Artificial Sequence
  Synthetic peptide
AASSLQS

SEQ ID NO: 486 - protein, 9 aa, Artificial Sequence
  Synthetic peptide
QQSYSTPIT

SEQ ID NO: 487 - protein, 120 aa, Artificial Sequence
  Synthetic peptide
EVQLLESGGGLVQPGGSLRLSCAASGFTFSSYAMSWVRQAPGKGLEWVSVISDSGGITDFADSVKGRSTISRDNSRNTLYLQMNSLRAEDTAVYFCARHDYSNYFFFDYWGQGTLVTVSS

SEQ ID NO: 488 - protein, 107 aa, Artificial Sequence
  Synthetic peptide
DIQMTQSPSSVSASVGDRVTITCRASQSISSYLNWYQQKPGKAPKLLIYAASSLQSGVPSRFSGSGSGTDFTLTISSLQPEDFATYYCQQSYSTPITFGQGTRLEIK

SEQ ID NO: 489 - protein, 242 aa, Artificial Sequence
  Synthetic peptide
EVQLLESGGGLVQPGGSLRLSCAASGFTFSSYAMSWVRQAPGKGLEWVSVISDSGGITDFADSVKGRSTISRDNSRNTLYLQMNSLRAEDTAVYFCARHDYSNYFFFDYWGQGTLVTVSSGGGGSGGGGSGGGGSDIQMTQSPSSVSASVGDRVTITCRASQSISSYLNWYQQKPGKAPKLLIYAASSLQSGVPSRFSGSGSGTDFTLTISSLQPEDFATYYCQQSYSTPITFGQGTRLEIK

SEQ ID NO: 490 - protein, 497 aa, Artificial Sequence
  Synthetic peptide
EVQLLESGGGLVQPGGSLRLSCAASGFTFSSYAMSWVRQAPGKGLEWVSVISDSGGITDFADSVKGRSTISRDNSRNTLYLQMNSLRAEDTAVYFCARHDYSNYFFFDYWGQGTLVTVSSGGGGSGGGGSGGGGSDIQMTQSPSSVSASVGDRVTITCRASQSISSYLNWYQQKPGKAPKLLIYAASSLQSGVPSRFSGSGSGTDFTLTISSLQPEDFATYYCQQSYSTPITFGQGTRLEIKSGGGGSEVQLVESGGGLVQPGGSLKLSCAASGFTFNKYAMNWVRQAPGKGLEWVARIRSKYNNYATYYADSVKDRFTISRDDSKNTAYLQMNNLKTEDTAVYYCVRHGNFGNSYISYWAYWGQGTLVTVSSGGGGSGGGGSGGGGSQTVVTQEPSLTVSPGGTVTLTCGSSTGAVTSGNYPNWVQQKPGQAPRGLIGGTKFLAPGTPARFSGSLLGGKAALTLSGVQPEDEAEYYCVLWYSNRWVFGGGTKLTVL

SEQ ID NO: 491 - protein, 5 aa, Artificial Sequence
  Synthetic peptide
TYAMS

SEQ ID NO: 492 - protein, 17 aa, Artificial Sequence
  Synthetic peptide
AISGSGGYTYYADSVEG

SEQ ID NO: 493 - protein, 11 aa, Artificial Sequence
  Synthetic peptide
HDYSNYAWFDP

SEQ ID NO: 494 - protein, 11 aa, Artificial Sequence
  Synthetic peptide
RASQSISSYLN

SEQ ID NO: 495 - protein, 7 aa, Artificial Sequence
  Synthetic peptide
AASSLQS

SEQ ID NO: 496 - protein, 9 aa, Artificial Sequence
  Synthetic peptide
QQSYSTPFT

SEQ ID NO: 497 - protein, 120 aa, Artificial Sequence; identical to SEQ ID NO: 347
  Synthetic peptide

SEQ ID NO: 498 - protein, 107 aa, Artificial Sequence
  Synthetic peptide
DIQMTQSPSSLSASVGDRVTITCRASQSISSYLNWYQQKPGKAPKLLIYAASSLQSGVPSRFSGSGSGTDFTLTISSLQPEDFATYYCQQSYSTPFTFGPGTRLEIK

SEQ ID NO: 499 - protein, 242 aa, Artificial Sequence
  Synthetic peptide
EVQLLESGGGLVQPGGSLRLSCAASGFTFSTYAMSWVRQAPGKGLDWVSAISGSGGYTYYADSVEGRFTISRDNSRNTLYLQMNSLRAEDTAVYYCASHDYSNYAWFDPWGQGTLVTVSSGGGGSGGGGSGGGGSDIQMTQSPSSLSASVGDRVTITCRASQSISSYLNWYQQKPGKAPKLLIYAASSLQSGVPSRFSGSGSGTDFTLTISSLQPEDFATYYCQQSYSTPFTFGPGTRLEIK

SEQ ID NO: 500 - protein, 497 aa, Artificial Sequence
  Synthetic peptide
EVQLLESGGGLVQPGGSLRLSCAASGFTFSTYAMSWVRQAPGKGLDWVSAISGSGGYTYYADSVEGRFTISRDNSRNTLYLQMNSLRAEDTAVYYCASHDYSNYAWFDPWGQGTLVTVSSGGGGSGGGGSGGGGSDIQMTQSPSSLSASVGDRVTITCRASQSISSYLNWYQQKPGKAPKLLIYAASSLQSGVPSRFSGSGSGTDFTLTISSLQPEDFATYYCQQSYSTPFTFGPGTRLEIKSGGGGSEVQLVESGGGLVQPGGSLKLSCAASGFTFNKYAMNWVRQAPGKGLEWVARIRSKYNNYATYYADSVKDRFTISRDDSKNTAYLQMNNLKTEDTAVYYCVRHGNFGNSYISYWAYWGQGTLVTVSSGGGGSGGGGSGGGGSQTVVTQEPSLTVSPGGTVTLTCGSSTGAVTSGNYPNWVQQKPGQAPRGLIGGTKFLAPGTPARFSGSLLGGKAALTLSGVQPEDEAEYYCVLWYSNRWVFGGGTKLTVL

SEQ ID NO: 501 - protein, 7 aa, Artificial Sequence
  Synthetic peptide
TDGYYWS

SEQ ID NO: 502 - protein, 16 aa, Artificial Sequence
  Synthetic peptide
YIYYSGSTNYNPSLKS

SEQ ID NO: 503 - protein, 8 aa, Artificial Sequence
  Synthetic peptide
GIGLGFEY

SEQ ID NO: 504 - protein, 11 aa, Artificial Sequence
  Synthetic peptide
GGNNIGSKSVH

SEQ ID NO: 505 - protein, 7 aa, Artificial Sequence
  Synthetic peptide
DDSDRPS

SEQ ID NO: 506 - protein, 12 aa, Artificial Sequence
  Synthetic peptide
QVWDRSSDQDVV

SEQ ID NO: 507 - protein, 118 aa, Artificial Sequence
  Synthetic peptide
QVQLQESGPGLVKPSETLSLTCTVSGGSVSTDGYYWSWIRQPPGKGLEWIGYIYYSGSTNYNPSLKSRVTISVDTSKNQFSLKLSSVTAADTAVYYCARGIGLGFEYWGQGTLVTVSS

SEQ ID NO: 508 - protein, 109 aa, Artificial Sequence
  Synthetic peptide
SYVLTQLTSVSVAPGQTARITCGGNNIGSKSVHWYQQKPGQAPVLVVYDDSDRPSGIPERFSGSNSGNTATLTISRVEAGDEADFYCQVWDRSSDQDVVFGGGTKLTVL

SEQ ID NO: 509 - protein, 242 aa, Artificial Sequence
  Synthetic peptide
QVQLQESGPGLVKPSETLSLTCTVSGGSVSTDGYYWSWIRQPPGKGLEWIGYIYYSGSTNYNPSLKSRVTISVDTSKNQFSLKLSSVTAADTAVYYCARGIGLGFEYWGQGTLVTVSSGGGGSGGGGSGGGGSSYVLTQLTSVSVAPGQTARITCGGNNIGSKSVHWYQQKPGQAPVLVVYDDSDRPSGIPERFSGSNSGNTATLTISRVEAGDEADFYCQVWDRSSDQDVVFGGGTKLTVL

SEQ ID NO: 510 - protein, 497 aa, Artificial Sequence
  Synthetic peptide
QVQLQESGPGLVKPSETLSLTCTVSGGSVSTDGYYWSWIRQPPGKGLEWIGYIYYSGSTNYNPSLKSRVTISVDTSKNQFSLKLSSVTAADTAVYYCARGIGLGFEYWGQGTLVTVSSGGGGSGGGGSGGGGSSYVLTQLTSVSVAPGQTARITCGGNNIGSKSVHWYQQKPGQAPVLVVYDDSDRPSGIPERFSGSNSGNTATLTISRVEAGDEADFYCQVWDRSSDQDVVFGGGTKLTVLSGGGGSEVQLVESGGGLVQPGGSLKLSCAASGFTFNKYAMNWVRQAPGKGLEWVARIRSKYNNYATYYADSVKDRFTISRDDSKNTAYLQMNNLKTEDTAVYYCVRHGNFGNSYISYWAYWGQGTLVTVSSGGGGSGGGGSGGGGSQTVVTQEPSLTVSPGGTVTLTCGSSTGAVTSGNYPNWVQQKPGQAPRGLIGGTKFLAPGTPARFSGSLLGGKAALTLSGVQPEDEAEYYCVLWYSNRWVFGGGTKLTVL

SEQ ID NO: 511 - protein, 7 aa, Artificial Sequence
  Synthetic peptide
TDGYYWS

SEQ ID NO: 512 - protein, 16 aa, Artificial Sequence
  Synthetic peptide
YIYYSGSTNYNPSLKS

SEQ ID NO: 513 - protein, 8 aa, Artificial Sequence
  Synthetic peptide
GIGLGFEY

SEQ ID NO: 514 - protein, 11 aa, Artificial Sequence
  Synthetic peptide
GGNNIGSKSVH

SEQ ID NO: 515 - protein, 7 aa, Artificial Sequence
  Synthetic peptide
DDSDRPS

SEQ ID NO: 516 - protein, 12 aa, Artificial Sequence
  Synthetic peptide
QVWDRSSDQDVV

SEQ ID NO: 517 - protein, 118 aa, Artificial Sequence; identical to SEQ ID NO: 507
  Synthetic peptide

SEQ ID NO: 518 - protein, 109 aa, Artificial Sequence
  Synthetic peptide
SYVLTQLSSVSVAPGQTARITCGGNNIGSKSVHWYQQKPGQAPVLVVYDDSDRPSGIPERFSGSNSGNTATLTISRVEAGDEADYYCQVWDRSSDQDVVFGGGTKLTVL

SEQ ID NO: 519 - protein, 242 aa, Artificial Sequence
  Synthetic peptide
QVQLQESGPGLVKPSETLSLTCTVSGGSVSTDGYYWSWIRQPPGKGLEWIGYIYYSGSTNYNPSLKSRVTISVDTSKNQFSLKLSSVTAADTAVYYCARGIGLGFEYWGQGTLVTVSSGGGGSGGGGSGGGGSSYVLTQLSSVSVAPGQTARITCGGNNIGSKSVHWYQQKPGQAPVLVVYDDSDRPSGIPERFSGSNSGNTATLTISRVEAGDEADYYCQVWDRSSDQDVVFGGGTKLTVL

SEQ ID NO: 520 - protein, 497 aa, Artificial Sequence
  Synthetic peptide
QVQLQESGPGLVKPSETLSLTCTVSGGSVSTDGYYWSWIRQPPGKGLEWIGYIYYSGSTNYNPSLKSRVTISVDTSKNQFSLKLSSVTAADTAVYYCARGIGLGFEYWGQGTLVTVSSGGGGSGGGGSGGGGSSYVLTQLSSVSVAPGQTARITCGGNNIGSKSVHWYQQKPGQAPVLVVYDDSDRPSGIPERFSGSNSGNTATLTISRVEAGDEADYYCQVWDRSSDQDVVFGGGTKLTVLSGGGGSEVQLVESGGGLVQPGGSLKLSCAASGFTFNKYAMNWVRQAPGKGLEWVARIRSKYNNYATYYADSVKDRFTISRDDSKNTAYLQMNNLKTEDTAVYYCVRHGNFGNSYISYWAYWGQGTLVTVSSGGGGSGGGGSGGGGSQTVVTQEPSLTVSPGGTVTLTCGSSTGAVTSGNYPNWVQQKPGQAPRGLIGGTKFLAPGTPARFSGSLLGGKAALTLSGVQPEDEAEYYCVLWYSNRWVFGGGTKLTVL

SEQ ID NO: 521 - protein, 5 aa, Artificial Sequence
  Synthetic peptide
SYAMS

SEQ ID NO: 522 - protein, 17 aa, Artificial Sequence
  Synthetic peptide
AISGSGGRTFYADSVEG

SEQ ID NO: 523 - protein, 11 aa, Artificial Sequence
  Synthetic peptide
HDYSNYPYFDY

SEQ ID NO: 524 - protein, 12 aa, Artificial Sequence
  Synthetic peptide
RASQSVRSSYLA

SEQ ID NO: 525 - protein, 7 aa, Artificial Sequence
  Synthetic peptide
GASSRAT

SEQ ID NO: 526 - protein, 9 aa, Artificial Sequence
  Synthetic peptide
QQYGSSPPT

SEQ ID NO: 527 - protein, 120 aa, Artificial Sequence; identical to SEQ ID NO: 157
  Synthetic peptide

SEQ ID NO: 528 - protein, 108 aa, Artificial Sequence
  Synthetic peptide
EIVLTQSPGTLSLSPGERATLSCRASQSVRSSYLAWYQQKPGQAPRLLIYGASSRATGIPDRFSGSGSGTDFTLTISRLEPEDFAVYFCQQYGSSPPTFGGGTRLEIK

SEQ ID NO: 529 - protein, 243 aa, Artificial Sequence
  Synthetic peptide
EVQLLESGGGMVQPGGSLRLSCAASGFTFSSYAMSWVRQAPGKGLEWVSAISGSGGRTFYADSVEGRFTISRDNSKNTLYLQMNSLRAEDTAVYYCAKHDYSNYPYFDYWGQGTLVTVSSGGGGSGGGGSGGGGSEIVLTQSPGTLSLSPGERATLSCRASQSVRSSYLAWYQQKPGQAPRLLIYGASSRATGIPDRFSGSGSGTDFTLTISRLEPEDFAVYFCQQYGSSPPTFGGGTRLEIK

SEQ ID NO: 530 - protein, 498 aa, Artificial Sequence
  Synthetic peptide
EVQLLESGGGMVQPGGSLRLSCAASGFTFSSYAMSWVRQAPGKGLEWVSAISGSGGRTFYADSVEGRFTISRDNSKNTLYLQMNSLRAEDTAVYYCAKHDYSNYPYFDYWGQGTLVTVSSGGGGSGGGGSGGGGSEIVLTQSPGTLSLSPGERATLSCRASQSVRSSYLAWYQQKPGQAPRLLIYGASSRATGIPDRFSGSGSGTDFTLTISRLEPEDFAVYFCQQYGSSPPTFGGGTRLEIKSGGGGSEVQLVESGGGLVQPGGSLKLSCAASGFTFNKYAMNWVRQAPGKGLEWVARIRSKYNNYATYYADSVKDRFTISRDDSKNTAYLQMNNLKTEDTAVYYCVRHGNFGNSYISYWAYWGQGTLVTVSSGGGGSGGGGSGGGGSQTVVTQEPSLTVSPGGTVTLTCGSSTGAVTSGNYPNWVQQKPGQAPRGLIGGTKFLAPGTPARFSGSLLGGKAALTLSGVQPEDEAEYYCVLWYSNRWVFGGGTKLTVL

SEQ ID NO: 531 - protein, 5 aa, Artificial Sequence
  Synthetic peptide
IYAMS

SEQ ID NO: 532 - protein, 17 aa, Artificial Sequence
  Synthetic peptide
AIGDSGGSTFYADSVKG

SEQ ID NO: 533 - protein, 11 aa, Artificial Sequence
  Synthetic peptide
HDYSNYPYFDY

SEQ ID NO: 534 - protein, 12 aa, Artificial Sequence
  Synthetic peptide
RASQSVRSSYVA

SEQ ID NO: 535 - protein, 7 aa, Artificial Sequence
  Synthetic peptide
GASSRAT

SEQ ID NO: 536 - protein, 9 aa, Artificial Sequence
  Synthetic peptide
QQYGDLPFT

SEQ ID NO: 537 - protein, 120 aa, Artificial Sequence
  Synthetic peptide
EVQLLESGGGLVQPGGSLRLSCAASGFTFSIYAMSWVRQAPGKGLEWVSAIGDSGGSTFYADSVKGRFTISRDNSKNTLYLQMNSLRAEDTAVYYCAKHDYSNYPYFDYWGQGTLVTVSS

SEQ ID NO: 538 - protein, 108 aa, Artificial Sequence
  Synthetic peptide
EIVLTQSPGTLSLSPGERATLSCRASQSVRSSYVAWYQQKPGQAPRLLIYGASSRATGIPDRFSGSGSGTDFTLTISRLEPEDFAVYYCQQYGDLPFTFGPGTRLEIK

SEQ ID NO: 539 - protein, 243 aa, Artificial Sequence
  Synthetic peptide
EVQLLESGGGLVQPGGSLRLSCAASGFTFSIYAMSWVRQAPGKGLEWVSAIGDSGGSTFYADSVKGRFTISRDNSKNTLYLQMNSLRAEDTAVYYCAKHDYSNYPYFDYWGQGTLVTVSSGGGGSGGGGSGGGGSEIVLTQSPGTLSLSPGERATLSCRASQSVRSSYVAWYQQKPGQAPRLLIYGASSRATGIPDRFSGSGSGTDFTLTISRLEPEDFAVYYCQQYGDLPFTFGPGTRLEIK

SEQ ID NO: 540 - protein, 498 aa, Artificial Sequence
  Synthetic peptide
EVQLLESGGGLVQPGGSLRLSCAASGFTFSIYAMSWVRQAPGKGLEWVSAIGDSGGSTFYADSVKGRFTISRDNSKNTLYLQMNSLRAEDTAVYYCAKHDYSNYPYFDYWGQGTLVTVSSGGGGSGGGGSGGGGSEIVLTQSPGTLSLSPGERATLSCRASQSVRSSYVAWYQQKPGQAPRLLIYGASSRATGIPDRFSGSGSGTDFTLTISRLEPEDFAVYYCQQYGDLPFTFGPGTRLEIKSGGGGSEVQLVESGGGLVQPGGSLKLSCAASGFTFNKYAMNWVRQAPGKGLEWVARIRSKYNNYATYYADSVKDRFTISRDDSKNTAYLQMNNLKTEDTAVYYCVRHGNFGNSYISYWAYWGQGTLVTVSSGGGGSGGGGSGGGGSQTVVTQEPSLTVSPGGTVTLTCGSSTGAVTSGNYPNWVQQKPGQAPRGLIGGTKFLAPGTPARFSGSLLGGKAALTLSGVQPEDEAEYYCVLWYSNRWVFGGGTKLTVL

SEQ ID NO: 541 - protein, 5 aa, Artificial Sequence
  Synthetic peptide
SYGMH

SEQ ID NO: 542 - protein, 17 aa, Artificial Sequence
  Synthetic peptide
VISYDGSNKYYADSVKG

SEQ ID NO: 543 - protein, 15 aa, Artificial Sequence
  Synthetic peptide
GRYYGSGNYNHGMDV

SEQ ID NO: 544 - protein, 11 aa, Artificial Sequence
  Synthetic peptide
RASQSISSYLN

SEQ ID NO: 545 - protein, 7 aa, Artificial Sequence
  Synthetic peptide
AASSLQS

SEQ ID NO: 546 - protein, 9 aa, Artificial Sequence
  Synthetic peptide
QQSYSTPFT

SEQ ID NO: 547 - protein, 124 aa, Artificial Sequence
  Synthetic peptide
QVQLVESGGGVVQPGRSLRLSCAASGFMFSSYGMHWVRQAPGKGLEWVAVISYDGSNKYYADSVKGRFTISRDNSKNTLYLQMNSLRAEDTAVYYCARGRYYGSGNYNHGMDVWGQGTTVTVSS

SEQ ID NO: 548 - protein, 107 aa, Artificial Sequence
  Synthetic peptide
DIQMTQSPSSLSASVGDRVTITCRASQSISSYLNWYQQKPGKAPKLLIYAASSLQSGVPSRFSGRGSGTDFTLTISSLQPEDFATYYCQQSYSTPFTFGPGTKVEIK

SEQ ID NO: 549 - protein, 246 aa, Artificial Sequence
  Synthetic peptide
QVQLVESGGGVVQPGRSLRLSCAASGFMFSSYGMHWVRQAPGKGLEWVAVISYDGSNKYYADSVKGRFTISRDNSKNTLYLQMNSLRAEDTAVYYCARGRYYGSGNYNHGMDVWGQGTTVTVSSGGGGSGGGGSGGGGSDIQMTQSPSSLSASVGDRVTITCRASQSISSYLNWYQQKPGKAPKLLIYAASSLQSGVPSRFSGRGSGTDFTLTISSLQPEDFATYYCQQSYSTPFTFGPGTKVEIK

SEQ ID NO: 550 - protein, 501 aa, Artificial Sequence
  Synthetic peptide
QVQLVESGGGVVQPGRSLRLSCAASGFMFSSYGMHWVRQAPGKGLEWVAVISYDGSNKYYADSVKGRFTISRDNSKNTLYLQMNSLRAEDTAVYYCARGRYYGSGNYNHGMDVWGQGTTVTVSSGGGGSGGGGSGGGGSDIQMTQSPSSLSASVGDRVTITCRASQSISSYLNWYQQKPGKAPKLLIYAASSLQSGVPSRFSGRGSGTDFTLTISSLQPEDFATYYCQQSYSTPFTFGPGTKVEIKSGGGGSEVQLVESGGGLVQPGGSLKLSCAASGFTFNKYAMNWVRQAPGKGLEWVARIRSKYNNYATYYADSVKDRFTISRDDSKNTAYLQMNNLKTEDTAVYYCVRHGNFGNSYISYWAYWGQGTLVTVSSGGGGSGGGGSGGGGSQTVVTQEPSLTVSPGGTVTLTCGSSTGAVTSGNYPNWVQQKPGQAPRGLIGGTKFLAPGTPARFSGSLLGGKAALTLSGVQPEDEAEYYCVLWYSNRWVFGGGTKLTVL

SEQ ID NO: 551 - protein, 5 aa, Artificial Sequence
  Synthetic peptide
SYGMH

SEQ ID NO: 552 - protein, 17 aa, Artificial Sequence
  Synthetic peptide
VISYDGSNKYYADSVKG

SEQ ID NO: 553 - protein, 15 aa, Artificial Sequence
  Synthetic peptide
GRYYGSGSYNYGMDV

SEQ ID NO: 554 - protein, 11 aa, Artificial Sequence
  Synthetic peptide
RASQSIFDYLN

SEQ ID NO: 555 - protein, 7 aa, Artificial Sequence
  Synthetic peptide
AASSLQS

SEQ ID NO: 556 - protein, 9 aa, Artificial Sequence
  Synthetic peptide
QQSYSTPLT

SEQ ID NO: 557 - protein, 124 aa, Artificial Sequence
  Synthetic peptide
QVQLVESGGGVVQPGRSLRLSCAASGFTFSSYGMHWVRQAPGKGLEWVAVISYDGSNKYYADSVKGRFTISRDNSKNTLYLQMNSLRAEDTAVYYCARGRYYGSGSYNYGMDVWGQGTTVTVSS

SEQ ID NO: 558 - protein, 107 aa, Artificial Sequence
  Synthetic peptide
DIQMTQSPSSLSASVGDRVTITCRASQSIFDYLNWYQQKPGKAPKLLIYAASSLQSGVPSRFSGSGFGTDFTLTISSLQPEDFATYYCQQSYSTPLTFGGGTKLEIK

SEQ ID NO: 559 - protein, 246 aa, Artificial Sequence
  Synthetic peptide
QVQLVESGGGVVQPGRSLRLSCAASGFTFSSYGMHWVRQAPGKGLEWVAVISYDGSNKYYADSVKGRFTISRDNSKNTLYLQMNSLRAEDTAVYYCARGRYYGSGSYNYGMDVWGQGTTVTVSSGGGGSGGGGSGGGGSDIQMTQSPSSLSASVGDRVTITCRASQSIFDYLNWYQQKPGKAPKLLIYAASSLQSGVPSRFSGSGFGTDFTLTISSLQPEDFATYYCQQSYSTPLTFGGGTKLEIK

SEQ ID NO: 560 - protein, 501 aa, Artificial Sequence
  Synthetic peptide
QVQLVESGGGVVQPGRSLRLSCAASGFTFSSYGMHWVRQAPGKGLEWVAVISYDGSNKYYADSVKGRFTISRDNSKNTLYLQMNSLRAEDTAVYYCARGRYYGSGSYNYGMDVWGQGTTVTVSSGGGGSGGGGSGGGGSDIQMTQSPSSLSASVGDRVTITCRASQSIFDYLNWYQQKPGKAPKLLIYAASSLQSGVPSRFSGSGFGTDFTLTISSLQPEDFATYYCQQSYSTPLTFGGGTKLEIKSGGGGSEVQLVESGGGLVQPGGSLKLSCAASGFTFNKYAMNWVRQAPGKGLEWVARIRSKYNNYATYYADSVKDRFTISRDDSKNTAYLQMNNLKTEDTAVYYCVRHGNFGNSYISYWAYWGQGTLVTVSSGGGGSGGGGSGGGGSQTVVTQEPSLTVSPGGTVTLTCGSSTGAVTSGNYPNWVQQKPGQAPRGLIGGTKFLAPGTPARFSGSLLGGKAALTLSGVQPEDEAEYYCVLWYSNRWVFGGGTKLTVL

SEQ ID NO: 561 - protein, 5 aa, Artificial Sequence
  Synthetic peptide
SYGMH

SEQ ID NO: 562 - protein, 17 aa, Artificial Sequence
  Synthetic peptide
VIWYDGSSEYYADSVKG

SEQ ID NO: 563 - protein, 11 aa, Artificial Sequence
  Synthetic peptide
DNSYNYYGMDV

SEQ ID NO: 564 - protein, 14 aa, Artificial Sequence
  Synthetic peptide
TGSSSNIGAAYDVH

SEQ ID NO: 565 - protein, 7 aa, Artificial Sequence
  Synthetic peptide
VNSHRPP

SEQ ID NO: 566 - protein, 11 aa, Artificial Sequence
  Synthetic peptide
LSYDNSLSGSV

SEQ ID NO: 567 - protein, 120 aa, Artificial Sequence
  Synthetic peptide
QVQLVESGGGVVQPGRSLRLSCAASGFTFSSYGMHWVRQAPGKGLEWVAVIWYDGSSEYYADSVKGRFTISRDNSKNTLYLQMNSLRAEDTAVYYCARDNSYNYYGMDVWGQGTTVTVSS

SEQ ID NO: 568 - protein, 111 aa, Artificial Sequence
  Synthetic peptide
QSVLTQPPSVSGAPGQRVTISCTGSSSNIGAAYDVHWYQQFPGTAPKLLIYVNSHRPPGVPDRFSGSKSGTSASLAITGLQAEDEADYYCLSYDNSLSGSVFGGGTKLTVL

SEQ ID NO: 569 - protein, 246 aa, Artificial Sequence
  Synthetic peptide
QVQLVESGGGVVQPGRSLRLSCAASGFTFSSYGMHWVRQAPGKGLEWVAVIWYDGSSEYYADSVKGRFTISRDNSKNTLYLQMNSLRAEDTAVYYCARDNSYNYYGMDVWGQGTTVTVSSGGGGSGGGGSGGGGSQSVLTQPPSVSGAPGQRVTISCTGSSSNIGAAYDVHWYQQFPGTAPKLLIYVNSHRPPGVPDRFSGSKSGTSASLAITGLQAEDEADYYCLSYDNSLSGSVFGGGTKLTVL

SEQ ID NO: 570 - protein, 501 aa, Artificial Sequence
  Synthetic peptide
QVQLVESGGGVVQPGRSLRLSCAASGFTFSSYGMHWVRQAPGKGLEWVAVIWYDGSSEYYADSVKGRFTISRDNSKNTLYLQMNSLRAEDTAVYYCARDNSYNYYGMDVWGQGTTVTVSSGGGGSGGGGSGGGGSQSVLTQPPSVSGAPGQRVTISCTGSSSNIGAAYDVHWYQQFPGTAPKLLIYVNSHRPPGVPDRFSGSKSGTSASLAITGLQAEDEADYYCLSYDNSLSGSVFGGGTKLTVLSGGGGSEVQLVESGGGLVQPGGSLKLSCAASGFTFNKYAMNWVRQAPGKGLEWVARIRSKYNNYATYYADSVKDRFTISRDDSKNTAYLQMNNLKTEDTAVYYCVRHGNFGNSYISYWAYWGQGTLVTVSSGGGGSGGGGSGGGGSQTVVTQEPSLTVSPGGTVTLTCGSSTGAVTSGNYPNWVQQKPGQAPRGLIGGTKFLAPGTPARFSGSLLGGKAALTLSGVQPEDEAEYYCVLWYSNRWVFGGGTKLTVL

SEQ ID NO: 571 - protein, 7 aa, Artificial Sequence
  Synthetic peptide
SSSYYWG

SEQ ID NO: 572 - protein, 16 aa, Artificial Sequence
  Synthetic peptide
SIYHSGGTYFNPSLKS

SEQ ID NO: 573 - protein, 15 aa, Artificial Sequence
  Synthetic peptide
HYEILTGYYPDVFDI

SEQ ID NO: 574 - protein, 11 aa, Artificial Sequence
  Synthetic peptide
RASQSISSYLN

SEQ ID NO: 575 - protein, 7 aa, Artificial Sequence
  Synthetic peptide
AASNLQS

SEQ ID NO: 576 - protein, 9 aa, Artificial Sequence
  Synthetic peptide
QQSFSSPRT

SEQ ID NO: 577 - protein, 125 aa, Artificial Sequence
  Synthetic peptide
QVQLQESGPGLVKPSQTLSLTCTVSGGSISSSSYYWGWIRQPPGKGLEWIGSIYHSGGTYFNPSLKSRVTISVDTSKNQFSLKLSSVTAADTAVYYCARHYEILTGYYPDVFDIWGQGTMVTVSS

SEQ ID NO: 578 - protein, 107 aa, Artificial Sequence
  Synthetic peptide
DIQMTQSPSSLSASVGDRVTITCRASQSISSYLNWYQQKPGKAPKLLIYAASNLQSGVSSRFSGSGSGTDFTLTISSLQPEDFATYYCQQSFSSPRTFGQGTKVEIK

SEQ ID NO: 579 - protein, 247 aa, Artificial Sequence
  Synthetic peptide
QVQLQESGPGLVKPSQTLSLTCTVSGGSISSSSYYWGWIRQPPGKGLEWIGSIYHSGGTYFNPSLKSRVTISVDTSKNQFSLKLSSVTAADTAVYYCARHYEILTGYYPDVFDIWGQGTMVTVSSGGGGSGGGGSGGGGSDIQMTQSPSSLSASVGDRVTITCRASQSISSYLNWYQQKPGKAPKLLIYAASNLQSGVSSRFSGSGSGTDFTLTISSLQPEDFATYYCQQSFSSPRTFGQGTKVEIK

SEQ ID NO: 580 - protein, 502 aa, Artificial Sequence [sequence omitted]

SEQ ID NO: 581 - protein, 5 aa, Artificial Sequence
  Synthetic peptide
GFYWS

SEQ ID NO: 582 - protein, 16 aa, Artificial Sequence
  Synthetic peptide
EIDHSGSTNYNPSLKS

SEQ ID NO: 583 - protein, 10 aa, Artificial Sequence
  Synthetic peptide
NGYSGYLFDY

SEQ ID NO: 584 - protein, 11 aa, Artificial Sequence
  Synthetic peptide
RASQIISSYLN

SEQ ID NO: 585 - protein, 7 aa, Artificial Sequence
  Synthetic peptide
GASSMQS

SEQ ID NO: 586 - protein, 9 aa, Artificial Sequence
  Synthetic peptide
QQSYSIPRT

SEQ ID NO: 587 - protein, 118 aa, Artificial Sequence
  Synthetic peptide
QVQLQQWGAGLLKPSETLSLTCAVYDGSVSGFYWSWIRQPPGKGLEWIGEIDHSGSTNYNPSLKSRVTISVDTSKNQFSLKLSSVTAADSAVYYCARNGYSGYLFDYWGQGTLVTVSS

SEQ ID NO: 588 - protein, 107 aa, Artificial Sequence
  Synthetic peptide
DIQMTQSPSSLSASVGDRVTITCRASQIISSYLNWYQQKPGKAPKVLIYGASSMQSGVPSRFSGSGYGTDFTLTISSLQPEDFATYYCQQSYSIPRTFGQGTKLEIK

SEQ ID NO: 589 - protein, 240 aa, Artificial Sequence
  Synthetic peptide
QVQLQQWGAGLLKPSETLSLTCAVYDGSVSGFYWSWIRQPPGKGLEWIGEIDHSGSTNYNPSLKSRVTISVDTSKNQFSLKLSSVTAADSAVYYCARNGYSGYLFDYWGQGTLVTVSSGGGGSGGGGSGGGGSDIQMTQSPSSLSASVGDRVTITCRASQIISSYLNWYQQKPGKAPKVLIYGASSMQSGVPSRFSGSGYGTDFTLTISSLQPEDFATYYCQQSYSIPRTFGQGTKLEIK

SEQ ID NO: 590 - protein, 495 aa, Artificial Sequence
  Synthetic peptide
QVQLQQWGAGLLKPSETLSLTCAVYDGSVSGFYWSWIRQPPGKGLEWIGEIDHSGSTNYNPSLKSRVTISVDTSKNQFSLKLSSVTAADSAVYYCARNGYSGYLFDYWGQGTLVTVSSGGGGSGGGGSGGGGSDIQMTQSPSSLSASVGDRVTITCRASQIISSYLNWYQQKPGKAPKVLIYGASSMQSGVPSRFSGSGYGTDFTLTISSLQPEDFATYYCQQSYSIPRTFGQGTKLEIKSGGGGSEVQLVESGGGLVQPGGSLKLSCAASGFTFNKYAMNWVRQAPGKGLEWVARIRSKYNNYATYYADSVKDRFTISRDDSKNTAYLQMNNLKTEDTAVYYCVRHGNFGNSYISYWAYWGQGTLVTVSSGGGGSGGGGSGGGGSQTVVTQEPSLTVSPGGTVTLTCGSSTGAVTSGNYPNWVQQKPGQAPRGLIGGTKFLAPGTPARFSGSLLGGKAALTLSGVQPEDEAEYYCVLWYSNRWVFGGGTKLTVL

SEQ ID NO: 591 - protein, 5 aa, Artificial Sequence
  Synthetic peptide
TYYWS

SEQ ID NO: 592 - protein, 16 aa, Artificial Sequence
  Synthetic peptide
RIYPTGITNYNPSLKS

SEQ ID NO: 593 - protein, 17 aa, Artificial Sequence
  Synthetic peptide
DRRFLEPSYYYYYGMDV

SEQ ID NO: 594 - protein, 16 aa, Artificial Sequence
  Synthetic peptide
RSSQSLLHSNGYNYLD

SEQ ID NO: 595 - protein, 7 aa, Artificial Sequence
  Synthetic peptide
LGSNRAS

SEQ ID NO: 596 - protein, 9 aa, Artificial Sequence
  Synthetic peptide
MQGLRTPFT

SEQ ID NO: 597 - protein, 125 aa, Artificial Sequence
  Synthetic peptide
QVQLQESGPGLVKPSETLSLTCTVSGDSISTYYWSWIRQPAGKGLEWIGRIYPTGITNYNPSLKSRVTISVDTSKNQFSLKLSSVTAADTAVYYCARDRRFLEPSYYYYYGMDVWGQGTTVTVSS

SEQ ID NO: 598 - protein, 112 aa, Artificial Sequence
  Synthetic peptide
DIVLTQSPLSLPVTPGEPASISCRSSQSLLHSNGYNYLDWYLQKPGQSPQLLIYLGSNRASGVPDRFSGSVSGTDFTLKISRVEAEDVGVYYCMQGLRTPFTFGPGTKLEIK

SEQ ID NO: 599 - protein, 252 aa, Artificial Sequence
  Synthetic peptide
QVQLQESGPGLVKPSETLSLTCTVSGDSISTYYWSWIRQPAGKGLEWIGRIYPTGITNYNPSLKSRVTISVDTSKNQFSLKLSSVTAADTAVYYCARDRRFLEPSYYYYYGMDVWGQGTTVTVSSGGGGSGGGGSGGGGSDIVLTQSPLSLPVTPGEPASISCRSSQSLLHSNGYNYLDWYLQKPGQSPQLLIYLGSNRASGVPDRFSGSVSGTDFTLKISRVEAEDVGVYYCMQGLRTPFTFGPGTKLEIK

SEQ ID NO: 600 - protein, 507 aa, Artificial Sequence
  Synthetic peptide
QVQLQESGPGLVKPSETLSLTCTVSGDSISTYYWSWIRQPAGKGLEWIGRIYPTGITNYNPSLKSRVTISVDTSKNQFSLKLSSVTAADTAVYYCARDRRFLEPSYYYYYGMDVWGQGTTVTVSSGGGGSGGGGSGGGGSDIVLTQSPLSLPVTPGEPASISCRSSQSLLHSNGYNYLDWYLQKPGQSPQLLIYLGSNRASGVPDRFSGSVSGTDFTLKISRVEAEDVGVYYCMQGLRTPFTFGPGTKLEIKSGGGGSEVQLVESGGGLVQPGGSLKLSCAASGFTFNKYAMNWVRQAPGKGLEWVARIRSKYNNYATYYADSVKDRFTISRDDSKNTAYLQMNNLKTEDTAVYYCVRHGNFGNSYISYWAYWGQGTLVTVSSGGGGSGGGGSGGGGSQTVVTQEPSLTVSPGGTVTLTCGSSTGAVTSGNYPNWVQQKPGQAPRGLIGGTKFLAPGTPARFSGSLLGGKAALTLSGVQPEDEAEYYCVLWYSNRWVFGGGTKLTVL

SEQ ID NO: 601 - protein, 5 aa, Artificial Sequence
  Synthetic peptide
SYAMS

SEQ ID NO: 602 - protein, 17 aa, Artificial Sequence
  Synthetic peptide
VISDSGGITDFADSVKG

SEQ ID NO: 603 - protein, 11 aa, Artificial Sequence
  Synthetic peptide
HDYSNYFFFDY

SEQ ID NO: 604 - protein, 11 aa, Artificial Sequence
  Synthetic peptide
RASQSISNYLN

SEQ ID NO: 605 - protein, 7 aa, Artificial Sequence
  Synthetic peptide
AASSLQS

SEQ ID NO: 606 - protein, 9 aa, Artificial Sequence
  Synthetic peptide
QQSYIIPPT

SEQ ID NO: 607 - protein, 120 aa, Artificial Sequence; identical to SEQ ID NO: 477
  Synthetic peptide

SEQ ID NO: 608 - protein, 107 aa, Artificial Sequence
  Synthetic peptide
DIQMTQSPSSLSASVGDRITITCRASQSISNYLNWYQQKPGKAPKLLISAASSLQSGVPSRFSGSGSGTDFTLTISSLQPEDFATYYCQQSYIIPPTFGQGTKVDIK

SEQ ID NO: 609 - protein, 242 aa, Artificial Sequence
  Synthetic peptide
EVQLLESGGGLVQPGGSLRLSCAASGFTFSSYAMSWVRQAPGKGLEWVSVISDSGGITDFADSVKGRFTISRDNSRNTLYLQMNSLRAEDTAVYFCARHDYSNYFFFDYWGQGTLVTVSSGGGGSGGGGSGGGGSDIQMTQSPSSLSASVGDRITITCRASQSISNYLNWYQQKPGKAPKLLISAASSLQSGVPSRFSGSGSGTDFTLTISSLQPEDFATYYCQQSYIIPPTFGQGTKVDIK

SEQ ID NO: 610 - protein, 497 aa, Artificial Sequence
  Synthetic peptide
EVQLLESGGGLVQPGGSLRLSCAASGFTFSSYAMSWVRQAPGKGLEWVSVISDSGGITDFADSVKGRFTISRDNSRNTLYLQMNSLRAEDTAVYFCARHDYSNYFFFDYWGQGTLVTVSSGGGGSGGGGSGGGGSDIQMTQSPSSLSASVGDRITITCRASQSISNYLNWYQQKPGKAPKLLISAASSLQSGVPSRFSGSGSGTDFTLTISSLQPEDFATYYCQQSYIIPPTFGQGTKVDIKSGGGGSEVQLVESGGGLVQPGGSLKLSCAASGFTFNKYAMNWVRQAPGKGLEWVARIRSKYNNYATYYADSVKDRFTISRDDSKNTAYLQMNNLKTEDTAVYYCVRHGNFGNSYISYWAYWGQGTLVTVSSGGGGSGGGGSGGGGSQTVVTQEPSLTVSPGGTVTLTCGSSTGAVTSGNYPNWVQQKPGQAPRGLIGGTKFLAPGTPARFSGSLLGGKAALTLSGVQPEDEAEYYCVLWYSNRWVFGGGTKLTVL

SEQ ID NO: 611 - protein, 5 aa, Artificial Sequence
  Synthetic peptide
SYSMN

SEQ ID NO: 612 - protein, 17 aa, Artificial Sequence
  Synthetic peptide
YISSSGGYIYYADSVKG

SEQ ID NO: 613 - protein, 11 aa, Artificial Sequence
  Synthetic peptide
GDYSNYAYFDY

SEQ ID NO: 614 - protein, 11 aa, Artificial Sequence
  Synthetic peptide
RASQGISNYLA

SEQ ID NO: 615 - protein, 7 aa, Artificial Sequence
  Synthetic peptide
AASTLQS

SEQ ID NO: 616 - protein, 9 aa, Artificial Sequence
  Synthetic peptide
QQYYSTPLT

SEQ ID NO: 617 - protein, 120 aa, Artificial Sequence
  Synthetic peptide
EVQLVESGGGLVKPGGSLRLSCAASGFTFSSYSMNWVRQAPGKGLEWVSYISSSGGYIYYADSVKGRFTISRDNAKNSLYLQMNSLRAEDAAVYYCSRGDYSNYAYFDYWGQGTLVTVSS

SEQ ID NO: 618 - protein, 107 aa, Artificial Sequence
  Synthetic peptide
DIQMTQSPSSLSASVGDRVTITCRASQGISNYLAWYQQKPGKVPKLLIYAASTLQSGVPSRFSGSGSGTDFTLTISSLQAEDVAVYYCQQYYSTPLTFGGGTKVEIK

SEQ ID NO: 619 - protein, 242 aa, Artificial Sequence
  Synthetic peptide
EVQLVESGGGLVKPGGSLRLSCAASGFTFSSYSMNWVRQAPGKGLEWVSYISSSGGYIYYADSVKGRFTISRDNAKNSLYLQMNSLRAEDAAVYYCSRGDYSNYAYFDYWGQGTLVTVSSGGGGSGGGGSGGGGSDIQMTQSPSSLSASVGDRVTITCRASQGISNYLAWYQQKPGKVPKLLIYAASTLQSGVPSRFSGSGSGTDFTLTISSLQAEDVAVYYCQQYYSTPLTFGGGTKVEIK

SEQ ID NO: 620 - protein, 497 aa, Artificial Sequence
  Synthetic peptide
EVQLVESGGGLVKPGGSLRLSCAASGFTFSSYSMNWVRQAPGKGLEWVSYISSSGGYIYYADSVKGRFTISRDNAKNSLYLQMNSLRAEDAAVYYCSRGDYSNYAYFDYWGQGTLVTVSSGGGGSGGGGSGGGGSDIQMTQSPSSLSASVGDRVTITCRASQGISNYLAWYQQKPGKVPKLLIYAASTLQSGVPSRFSGSGSGTDFTLTISSLQAEDVAVYYCQQYYSTPLTFGGGTKVEIKSGGGGSEVQLVESGGGLVQPGGSLKLSCAASGFTFNKYAMNWVRQAPGKGLEWVARIRSKYNNYATYYADSVKDRFTISRDDSKNTAYLQMNNLKTEDTAVYYCVRHGNFGNSYISYWAYWGQGTLVTVSSGGGGSGGGGSGGGGSQTVVTQEPSLTVSPGGTVTLTCGSSTGAVTSGNYPNWVQQKPGQAPRGLIGGTKFLAPGTPARFSGSLLGGKAALTLSGVQPEDEAEYYCVLWYSNRWVFGGGTKLTVL

SEQ ID NO: 621 - protein, 5 aa, Artificial Sequence
  Synthetic peptide
TYTMN

SEQ ID NO: 622 - protein, 17 aa, Artificial Sequence
  Synthetic peptide
SISSSSGYIYYADSVKG

SEQ ID NO: 623 - protein, 11 aa, Artificial Sequence
  Synthetic peptide
GDYSNYLYFDL

SEQ ID NO: 624 - protein, 12 aa, Artificial Sequence
  Synthetic peptide
RASQSFRSSYLA

SEQ ID NO: 625 - protein, 7 aa, Artificial Sequence
  Synthetic peptide
GASSRAT

SEQ ID NO: 626 - protein, 9 aa, Artificial Sequence
  Synthetic peptide
QLYGSLPIT

SEQ ID NO: 627 - protein, 120 aa, Artificial Sequence
  Synthetic peptide
EVQLVESGGGLVKPGGSLRLSCAASGITFSTYTMNWVRQAPGKGLEWVSSISSSSGYIYYADSVKGRFTISRDNAKNSLYLQMNSLRAEDTAVYYCARGDYSNYLYFDLWGRGTLVTVSS

SEQ ID NO: 628 - protein, 108 aa, Artificial Sequence
  Synthetic peptide
EIVLTQSPGTLSLSPGERATLSCRASQSFRSSYLAWYQQKPGQAPRLLIHGASSRATGIPDRFSGSGSGTDFTLTISRLEPEDFAVYYCQLYGSLPITFGQGTRLEIK

SEQ ID NO: 629 - protein, 243 aa, Artificial Sequence
  Synthetic peptide
EVQLVESGGGLVKPGGSLRLSCAASGITFSTYTMNWVRQAPGKGLEWVSSISSSSGYIYYADSVKGRFTISRDNAKNSLYLQMNSLRAEDTAVYYCARGDYSNYLYFDLWGRGTLVTVSSGGGGSGGGGSGGGGSEIVLTQSPGTLSLSPGERATLSCRASQSFRSSYLAWYQQKPGQAPRLLIHGASSRATGIPDRFSGSGSGTDFTLTISRLEPEDFAVYYCQLYGSLPITFGQGTRLEIK

SEQ ID NO: 630 - protein, 498 aa, Artificial Sequence
  Synthetic peptide
EVQLVESGGGLVKPGGSLRLSCAASGITFSTYTMNWVRQAPGKGLEWVSSISSSSGYIYYADSVKGRFTISRDNAKNSLYLQMNSLRAEDTAVYYCARGDYSNYLYFDLWGRGTLVTVSSGGGGSGGGGSGGGGSEIVLTQSPGTLSLSPGERATLSCRASQSFRSSYLAWYQQKPGQAPRLLIHGASSRATGIPDRFSGSGSGTDFTLTISRLEPEDFAVYYCQLYGSLPITFGQGTRLEIKSGGGGSEVQLVESGGGLVQPGGSLKLSCAASGFTFNKYAMNWVRQAPGKGLEWVARIRSKYNNYATYYADSVKDRFTISRDDSKNTAYLQMNNLKTEDTAVYYCVRHGNFGNSYISYWAYWGQGTLVTVSSGGGGSGGGGSGGGGSQTVVTQEPSLTVSPGGTVTLTCGSSTGAVTSGNYPNWVQQKPGQAPRGLIGGTKFLAPGTPARFSGSLLGGKAALTLSGVQPEDEAEYYCVLWYSNRWVFGGGTKLTVL

SEQ ID NO: 631 - protein, 5 aa, Artificial Sequence
  Synthetic peptide
VYAMS

SEQ ID NO: 632 - protein, 17 aa, Artificial Sequence
  Synthetic peptide
TISDSGGSTFYADSVKG

SEQ ID NO: 633 - protein, 11 aa, Artificial Sequence
  Synthetic peptide
HDYSNYAYFDY

SEQ ID NO: 634 - protein, 12 aa, Artificial Sequence
  Synthetic peptide
RASQSVRSSYLA

SEQ ID NO: 635 - protein, 7 aa, Artificial Sequence
  Synthetic peptide
GASSRAT

SEQ ID NO: 636 - protein, 9 aa, Artificial Sequence
  Synthetic peptide
QQYGDLPFT

SEQ ID NO: 637 - protein, 120 aa, Artificial Sequence
  Synthetic peptide
EVQLLESGGGLVQPGGSLRLSCAASGFTFSVYAMSWVRQAPGKCLEWVSTISDSGGSTFYADSVKGRFTISRDNSKNTLYLQMNRLRAEDTAVYYCARHDYSNYAYFDYWGQGTLVTVSS

SEQ ID NO: 638 - protein, 108 aa, Artificial Sequence
  Synthetic peptide
EIVLTQSPGTLSLSPGERATLSCRASQSVRSSYLAWYQQKPGQAPRLLIYGASSRATGIPDRFSGSGSGTDFTLTISRLEPEDFAVYYCQQYGDLPFTFGCGTKVEIK

SEQ ID NO: 639 - protein, 243 aa, Artificial Sequence
  Synthetic peptide
EVQLLESGGGLVQPGGSLRLSCAASGFTFSVYAMSWVRQAPGKCLEWVSTISDSGGSTFYADSVKGRFTISRDNSKNTLYLQMNRLRAEDTAVYYCARHDYSNYAYFDYWGQGTLVTVSSGGGGSGGGGSGGGGSEIVLTQSPGTLSLSPGERATLSCRASQSVRSSYLAWYQQKPGQAPRLLIYGASSRATGIPDRFSGSGSGTDFTLTISRLEPEDFAVYYCQQYGDLPFTFGCGTKVEIK

SEQ ID NO: 640 - protein, 498 aa, Artificial Sequence
  Synthetic peptide
EVQLLESGGGLVQPGGSLRLSCAASGFTFSVYAMSWVRQAPGKCLEWVSTISDSGGSTFYADSVKGRFTISRDNSKNTLYLQMNRLRAEDTAVYYCARHDYSNYAYFDYWGQGTLVTVSSGGGGSGGGGSGGGGSEIVLTQSPGTLSLSPGERATLSCRASQSVRSSYLAWYQQKPGQAPRLLIYGASSRATGIPDRFSGSGSGTDFTLTISRLEPEDFAVYYCQQYGDLPFTFGCGTKVEIKSGGGGSEVQLVESGGGLVQPGGSLKLSCAASGFTFNKYAMNWVRQAPGKGLEWVARIRSKYNNYATYYADSVKDRFTISRDDSKNTAYLQMNNLKTEDTAVYYCVRHGNFGNSYISYWAYWGQGTLVTVSSGGGGSGGGGSGGGGSQTVVTQEPSLTVSPGGTVTLTCGSSTGAVTSGNYPNWVQQKPGQAPRGLIGGTKFLAPGTPARFSGSLLGGKAALTLSGVQPEDEAEYYCVLWYSNRWVFGGGTKLTVL

SEQ ID NO: 641 - protein, 5 aa, Artificial Sequence
  Synthetic peptide
TYAMS

SEQ ID NO: 642 - protein, 17 aa, Artificial Sequence
  Synthetic peptide
AISGSGGYTYYADSVEG

SEQ ID NO: 643 - protein, 11 aa, Artificial Sequence
  Synthetic peptide
HDYSNYAWFDP

SEQ ID NO: 644 - protein, 12 aa, Artificial Sequence
  Synthetic peptide
RASQSVSSAYLA

SEQ ID NO: 645 - protein, 7 aa, Artificial Sequence
  Synthetic peptide
GASSRAT

SEQ ID NO: 646 - protein, 9 aa, Artificial Sequence
  Synthetic peptide
QQFGSSPFT

SEQ ID NO: 647 - protein, 120 aa, Artificial Sequence
  Synthetic peptide
EVQLLESGGGLVQPGGSLRLSCAASGFTFSTYAMSWVRQAPGKCLDWVSAISGSGGYTYYADSVEGRFTISRDNSRNTLYLQMNSLRAEDTAVYYCASHDYSNYAWFDPWGQGTLVTVSS

SEQ ID NO: 648 - protein, 108 aa, Artificial Sequence
  Synthetic peptide
EIVLTQSPGTLSLSPGERATLSCRASQSVSSAYLAWYQQKPGQAPRLLIYGASSRATGIPDRFSGSGSGTDFTLTISRLEPEDFAVYYCQQFGSSPFTFGCGTKVEIK

SEQ ID NO: 649 - protein, 243 aa, Artificial Sequence
  Synthetic peptide
EVQLLESGGGLVQPGGSLRLSCAASGFTFSTYAMSWVRQAPGKCLDWVSAISGSGGYTYYADSVEGRFTISRDNSRNTLYLQMNSLRAEDTAVYYCASHDYSNYAWFDPWGQGTLVTVSSGGGGSGGGGSGGGGSEIVLTQSPGTLSLSPGERATLSCRASQSVSSAYLAWYQQKPGQAPRLLIYGASSRATGIPDRFSGSGSGTDFTLTISRLEPEDFAVYYCQQFGSSPFTFGCGTKVEIK

SEQ ID NO: 650 - protein, 498 aa, Artificial Sequence
  Synthetic peptide
EVQLLESGGGLVQPGGSLRLSCAASGFTFSTYAMSWVRQAPGKCLDWVSAISGSGGYTYYADSVEGRFTISRDNSRNTLYLQMNSLRAEDTAVYYCASHDYSNYAWFDPWGQGTLVTVSSGGGGSGGGGSGGGGSEIVLTQSPGTLSLSPGERATLSCRASQSVSSAYLAWYQQKPGQAPRLLIYGASSRATGIPDRFSGSGSGTDFTLTISRLEPEDFAVYYCQQFGSSPFTFGCGTKVEIKSGGGGSEVQLVESGGGLVQPGGSLKLSCAASGFTFNKYAMNWVRQAPGKGLEWVARIRSKYNNYATYYADSVKDRFTISRDDSKNTAYLQMNNLKTEDTAVYYCVRHGNFGNSYISYWAYWGQGTLVTVSSGGGGSGGGGSGGGGSQTVVTQEPSLTVSPGGTVTLTCGSSTGAVTSGNYPNWVQQKPGQAPRGLIGGTKFLAPGTPARFSGSLLGGKAALTLSGVQPEDEAEYYCVLWYSNRWVFGGGTKLTVL

SEQ ID NO: 651 - protein, 5 aa, Artificial Sequence
  Synthetic peptide
SYAMS

SEQ ID NO: 652 - protein, 17 aa, Artificial Sequence
  Synthetic peptide
AISGSGGRTYYADSVKG

SEQ ID NO: 653 - protein, 11 aa, Artificial Sequence
  Synthetic peptide
HDYSNYPYFDY

SEQ ID NO: 654 - protein, 12 aa, Artificial Sequence
  Synthetic peptide
RASQSVRGSYLA

SEQ ID NO: 655 - protein, 7 aa, Artificial Sequence
  Synthetic peptide
SASSRAT

SEQ ID NO: 656 - protein, 9 aa, Artificial Sequence
  Synthetic peptide
QQYGDSPFT

SEQ ID NO: 657 - protein, 120 aa, Artificial Sequence
  Synthetic peptide
EVQLLESGGGLVQPGGSLRLSCAASGFTFSSYAMSWVRQAPGQCLEWVSAISGSGGRTYYADSVKGRFTISRDNSKNTLYLQMNSLRAEDTAVYYCAKHDYSNYPYFDYWGQGTLVTVSS

SEQ ID NO: 658 - protein, 108 aa, Artificial Sequence
  Synthetic peptide
EIVLTQSPGTLSLSPGERATLSCRASQSVRGSYLAWYQQKPGQAPRLLIYSASSRATGIPDRFSGSGSGTDFTLTISRLEPEDFAVYYCQQYGDSPFTFGCGTKVEIK

SEQ ID NO: 659 - protein, 243 aa, Artificial Sequence
  Synthetic peptide
EVQLLESGGGLVQPGGSLRLSCAASGFTFSSYAMSWVRQAPGQCLEWVSAISGSGGRTYYADSVKGRFTISRDNSKNTLYLQMNSLRAEDTAVYYCAKHDYSNYPYFDYWGQGTLVTVSSGGGGSGGGGSGGGGSEIVLTQSPGTLSLSPGERATLSCRASQSVRGSYLAWYQQKPGQAPRLLIYSASSRATGIPDRFSGSGSGTDFTLTISRLEPEDFAVYYCQQYGDSPFTFGCGTKVEIK

SEQ ID NO: 660 - protein, 498 aa, Artificial Sequence
  Synthetic peptide
EVQLLESGGGLVQPGGSLRLSCAASGFTFSSYAMSWVRQAPGQCLEWVSAISGSGGRTYYADSVKGRFTISRDNSKNTLYLQMNSLRAEDTAVYYCAKHDYSNYPYFDYWGQGTLVTVSSGGGGSGGGGSGGGGSEIVLTQSPGTLSLSPGERATLSCRASQSVRGSYLAWYQQKPGQAPRLLIYSASSRATGIPDRFSGSGSGTDFTLTISRLEPEDFAVYYCQQYGDSPFTFGCGTKVEIKSGGGGSEVQLVESGGGLVQPGGSLKLSCAASGFTFNKYAMNWVRQAPGKGLEWVARIRSKYNNYATYYADSVKDRFTISRDDSKNTAYLQMNNLKTEDTAVYYCVRHGNFGNSYISYWAYWGQGTLVTVSSGGGGSGGGGSGGGGSQTVVTQEPSLTVSPGGTVTLTCGSSTGAVTSGNYPNWVQQKPGQAPRGLIGGTKFLAPGTPARFSGSLLGGKAALTLSGVQPEDEAEYYCVLWYSNRWVFGGGTKLTVL

SEQ ID NO: 661 - protein, 5 aa, Artificial Sequence
  Synthetic peptide
SYAMS

SEQ ID NO: 662 - protein, 17 aa, Artificial Sequence
  Synthetic peptide
VISDSGGITDFADSVKG

SEQ ID NO: 663 - protein, 11 aa, Artificial Sequence
  Synthetic peptide
HDYSNYFFFDY

SEQ ID NO: 664 - protein, 11 aa, Artificial Sequence
  Synthetic peptide
RASQDISNYLN

SEQ ID NO: 665 - protein, 7 aa, Artificial Sequence
  Synthetic peptide
AASSLQS

SEQ ID NO: 666 - protein, 9 aa, Artificial Sequence
  Synthetic peptide
QQSYISPPT

SEQ ID NO: 667 - protein, 120 aa, Artificial Sequence
  Synthetic peptide
EVQLLESGGGLVQPGGSLRLSCAASGFTFSSYAMSWVRQAPGKCLEWVSVISDSGGITDFADSVKGRFIISRDNSRNTLYLQMNSLRAEDTAVYFCARHDYSNYFFFDYWGQGTLVTVSS

SEQ ID NO: 668 - protein, 107 aa, Artificial Sequence
  Synthetic peptide
DIQMTQSPSSLSASVGDRVTITCRASQDISNYLNWYQQKSGKAPELLIYAASSLQSGVPSRFSGSGSGTDFTLTISSLQPEDFATYYCQQSYISPPTFGCGTKVEIK

SEQ ID NO: 669 - protein, 242 aa, Artificial Sequence
  Synthetic peptide
EVQLLESGGGLVQPGGSLRLSCAASGFTFSSYAMSWVRQAPGKCLEWVSVISDSGGITDFADSVKGRFIISRDNSRNTLYLQMNSLRAEDTAVYFCARHDYSNYFFFDYWGQGTLVTVSSGGGGSGGGGSGGGGSDIQMTQSPSSLSASVGDRVTITCRASQDISNYLNWYQQKSGKAPELLIYAASSLQSGVPSRFSGSGSGTDFTLTISSLQPEDFATYYCQQSYISPPTFGCGTKVEIK

SEQ ID NO: 670 - protein, 497 aa, Artificial Sequence
  Synthetic peptide
EVQLLESGGGLVQPGGSLRLSCAASGFTFSSYAMSWVRQAPGKCLEWVSVISDSGGITDFADSVKGRFIISRDNSRNTLYLQMNSLRAEDTAVYFCARHDYSNYFFFDYWGQGTLVTVSSGGGGSGGGGSGGGGSDIQMTQSPSSLSASVGDRVTITCRASQDISNYLNWYQQKSGKAPELLIYAASSLQSGVPSRFSGSGSGTDFTLTISSLQPEDFATYYCQQSYISPPTFGCGTKVEIKSGGGGSEVQLVESGGGLVQPGGSLKLSCAASGFTFNKYAMNWVRQAPGKGLEWVARIRSKYNNYATYYADSVKDRFTISRDDSKNTAYLQMNNLKTEDTAVYYCVRHGNFGNSYISYWAYWGQGTLVTVSSGGGGSGGGGSGGGGSQTVVTQEPSLTVSPGGTVTLTCGSSTGAVTSGNYPNWVQQKPGQAPRGLIGGTKFLAPGTPARFSGSLLGGKAALTLSGVQPEDEAEYYCVLWYSNRWVFGGGTKLTVL

SEQ ID NO: 671 - protein, 5 aa, Artificial Sequence
  Synthetic peptide
SYAMS

SEQ ID NO: 672 - protein, 17 aa, Artificial Sequence
  Synthetic peptide
VISDSGGITDFADSVKG

SEQ ID NO: 673 - protein, 11 aa, Artificial Sequence
  Synthetic peptide
HDYSNYFFFDY

SEQ ID NO: 674 - protein, 11 aa, Artificial Sequence
  Synthetic peptide
RASQGISNYLA

SEQ ID NO: 675 - protein, 7 aa, Artificial Sequence
  Synthetic peptide
AASILQS

SEQ ID NO: 676 - protein, 9 aa, Artificial Sequence
  Synthetic peptide
QQYFAYPIT

SEQ ID NO: 677 - protein, 120 aa, Artificial Sequence
  Synthetic peptide
EVQLLESGGGLVQPGGSLRLSCAASGFTFSSYAMSWVRQAPGKCLEWVSVISDSGGITDFADSVKGRFTISRDNSRNTLYLQMNSLRAEDTAVYFCARHDYSNYFFFDYWGQGTLVTVSS

SEQ ID NO: 678 - protein, 107 aa, Artificial Sequence
  Synthetic peptide
DIQMTQSPSSLSASVGDRVTITCRASQGISNYLAWYQQKPGKVPKLLIYAASILQSGVPSKFSGSGSGTDFTLTISSLQPEDFAIYYCQQYFAYPITFGCGTRLEIK

SEQ ID NO: 679 - protein, 242 aa, Artificial Sequence
  Synthetic peptide
EVQLLESGGGLVQPGGSLRLSCAASGFTFSSYAMSWVRQAPGKCLEWVSVISDSGGITDFADSVKGRFTISRDNSRNTLYLQMNSLRAEDTAVYFCARHDYSNYFFFDYWGQGTLVTVSSGGGGSGGGGSGGGGSDIQMTQSPSSLSASVGDRVTITCRASQGISNYLAWYQQKPGKVPKLLIYAASILQSGVPSKFSGSGSGTDFTLTISSLQPEDFAIYYCQQYFAYPITFGCGTRLEIK

SEQ ID NO: 680 - protein, 497 aa, Artificial Sequence
  Synthetic peptide
EVQLLESGGGLVQPGGSLRLSCAASGFTFSSYAMSWVRQAPGKCLEWVSVISDSGGITDFADSVKGRFTISRDNSRNTLYLQMNSLRAEDTAVYFCARHDYSNYFFFDYWGQGTLVTVSSGGGGSGGGGSGGGGSDIQMTQSPSSLSASVGDRVTITCRASQGISNYLAWYQQKPGKVPKLLIYAASILQSGVPSKFSGSGSGTDFTLTISSLQPEDFAIYYCQQYFAYPITFGCGTRLEIKSGGGGSEVQLVESGGGLVQPGGSLKLSCAASGFTFNKYAMNWVRQAPGKGLEWVARIRSKYNNYATYYADSVKDRFTISRDDSKNTAYLQMNNLKTEDTAVYYCVRHGNFGNSYISYWAYWGQGTLVTVSSGGGGSGGGGSGGGGSQTVVTQEPSLTVSPGGTVTLTCGSSTGAVTSGNYPNWVQQKPGQAPRGLIGGTKFLAPGTPARFSGSLLGGKAALTLSGVQPEDEAEYYCVLWYSNRWVFGGGTKLTVL

SEQ ID NO: 681 - protein, 7 aa, Artificial Sequence
  Synthetic peptide
TDGYYWS

SEQ ID NO: 682 - protein, 16 aa, Artificial Sequence
  Synthetic peptide
YIYYSGSTNYNPSLKS

SEQ ID NO: 683 - protein, 8 aa, Artificial Sequence
  Synthetic peptide
GIGLGFEY

SEQ ID NO: 684 - protein, 11 aa, Artificial Sequence
  Synthetic peptide
GGNNIGSKSVH

SEQ ID NO: 685 - protein, 7 aa, Artificial Sequence
  Synthetic peptide
DDSDRPS

SEQ ID NO: 686 - protein, 12 aa, Artificial Sequence
  Synthetic peptide
QVWDRSSDQDVV

SEQ ID NO: 687 - protein, 118 aa, Artificial Sequence
  Synthetic peptide
QVQLQESGPGLVKPSETLSLTCTVSGGSVSTDGYYWSWIRQPPGKCLEWIGYIYYSGSTNYNPSLKSRVTISVDTSKNQFSLKLISVTAADTAVYYCARGIGLGFEYWGQGTLVTVSS

SEQ ID NO: 688 - protein, 109 aa, Artificial Sequence
  Synthetic peptide
SYVLTQLSSVSVAPGQTARITCGGNNIGSKSVHWYQQKPGQAPVLVVYDDSDRPSGIPERFSGSNSGNTATLTISRVEAGDEADYYCQVWDRSSDQDVVFGCGTKLTVL

SEQ ID NO: 689 - protein, 242 aa, Artificial Sequence
  Synthetic peptide
QVQLQESGPGLVKPSETLSLTCTVSGGSVSTDGYYWSWIRQPPGKCLEWIGYIYYSGSTNYNPSLKSRVTISVDTSKNQFSLKLISVTAADTAVYYCARGIGLGFEYWGQGTLVTVSSGGGGSGGGGSGGGGSSYVLTQLSSVSVAPGQTARITCGGNNIGSKSVHWYQQKPGQAPVLVVYDDSDRPSGIPERFSGSNSGNTATLTISRVEAGDEADYYCQVWDRSSDQDVVFGCGTKLTVL

SEQ ID NO: 690 - protein, 497 aa, Artificial Sequence
  Synthetic peptide
QVQLQESGPGLVKPSETLSLTCTVSGGSVSTDGYYWSWIRQPPGKCLEWIGYIYYSGSTNYNPSLKSRVTISVDTSKNQFSLKLISVTAADTAVYYCARGIGLGFEYWGQGTLVTVSSGGGGSGGGGSGGGGSSYVLTQLSSVSVAPGQTARITCGGNNIGSKSVHWYQQKPGQAPVLVVYDDSDRPSGIPERFSGSNSGNTATLTISRVEAGDEADYYCQVWDRSSDQDVVFGCGTKLTVLSGGGGSEVQLVESGGGLVQPGGSLKLSCAASGFTFNKYAMNWVRQAPGKGLEWVARIRSKYNNYATYYADSVKDRFTISRDDSKNTAYLQMNNLKTEDTAVYYCVRHGNFGNSYISYWAYWGQGTLVTVSSGGGGSGGGGSGGGGSQTVVTQEPSLTVSPGGTVTLTCGSSTGAVTSGNYPNWVQQKPGQAPRGLIGGTKFLAPGTPARFSGSLLGGKAALTLSGVQPEDEAEYYCVLWYSNRWVFGGGTKLTVL

SEQ ID NO: 691 - protein, 5 aa, Artificial Sequence
  Synthetic peptide
SYGMH

SEQ ID NO: 692 - protein, 17 aa, Artificial Sequence
  Synthetic peptide
VISYDGSNKYYADSVKG

SEQ ID NO: 693 - protein, 15 aa, Artificial Sequence
  Synthetic peptide
GRYYGSGNYNHGMDV

SEQ ID NO: 694 - protein, 11 aa, Artificial Sequence
  Synthetic peptide
RASQSISSYLN

SEQ ID NO: 695 - protein, 7 aa, Artificial Sequence
  Synthetic peptide
AASSLQS

SEQ ID NO: 696 - protein, 9 aa, Artificial Sequence
  Synthetic peptide
QQSYSTPFT

SEQ ID NO: 697 - protein, 124 aa, Artificial Sequence
  Synthetic peptide
QVQLVESGGGVVQPGRSLRLSCAASGFMFSSYGMHWVRQAPGKCLEWVAVISYDGSNKYYADSVKGRFTISRDNSKNTLYLQMNSLRAEDTAVYYCARGRYYGSGNYNHGMDVWGQGTTVTVSS

SEQ ID NO: 698 - protein, 107 aa, Artificial Sequence
  Synthetic peptide
DIQMTQSPSSLSASVGDRVTITCRASQSISSYLNWYQQKPGKAPKLLIYAASSLQSGVPSRFSGRGSGTDFTLTISSLQPEDFATYYCQQSYSTPFTFGCGTKVEIK

SEQ ID NO: 699 - protein, 246 aa, Artificial Sequence
  Synthetic peptide
QVQLVESGGGVVQPGRSLRLSCAASGFMFSSYGMHWVRQAPGKCLEWVAVISYDGSNKYYADSVKGRFTISRDNSKNTLYLQMNSLRAEDTAVYYCARGRYYGSGNYNHGMDVWGQGTTVTVSSGGGGSGGGGSGGGGSDIQMTQSPSSLSASVGDRVTITCRASQSISSYLNWYQQKPGKAPKLLIYAASSLQSGVPSRFSGRGSGTDFTLTISSLQPEDFATYYCQQSYSTPFTFGCGTKVEIK

SEQ ID NO: 700 - protein, 501 aa, Artificial Sequence
  Synthetic peptide
QVQLVESGGGVVQPGRSLRLSCAASGFMFSSYGMHWVRQAPGKCLEWVAVISYDGSNKYYADSVKGRFTISRDNSKNTLYLQMNSLRAEDTAVYYCARGRYYGSGNYNHGMDVWGQGTTVTVSSGGGGSGGGGSGGGGSDIQMTQSPSSLSASVGDRVTITCRASQSISSYLNWYQQKPGKAPKLLIYAASSLQSGVPSRFSGRGSGTDFTLTISSLQPEDFATYYCQQSYSTPFTFGCGTKVEIKSGGGGSEVQLVESGGGLVQPGGSLKLSCAASGFTFNKYAMNWVRQAPGKGLEWVARIRSKYNNYATYYADSVKDRFTISRDDSKNTAYLQMNNLKTEDTAVYYCVRHGNFGNSYISYWAYWGQGTLVTVSSGGGGSGGGGSGGGGSQTVVTQEPSLTVSPGGTVTLTCGSSTGAVTSGNYPNWVQQKPGQAPRGLIGGTKFLAPGTPARFSGSLLGGKAALTLSGVQPEDEAEYYCVLWYSNRWVFGGGTKLTVL

SEQ ID NO: 701 - protein, 5 aa, Artificial Sequence
  Synthetic peptide
SYGMH

SEQ ID NO: 702 - protein, 17 aa, Artificial Sequence
  Synthetic peptide
VISYDGSNKYYADSVKG

SEQ ID NO: 703 - protein, 15 aa, Artificial Sequence
  Synthetic peptide
GRYYGSGSYNYGMDV

SEQ ID NO: 704 - protein, 11 aa, Artificial Sequence
  Synthetic peptide
RASQSIFDYLN

SEQ ID NO: 705 - protein, 7 aa, Artificial Sequence
  Synthetic peptide
AASSLQS

SEQ ID NO: 706 - protein, 9 aa, Artificial Sequence
  Synthetic peptide
QQSYSTPLT

SEQ ID NO: 707 - protein, 124 aa, Artificial Sequence
  Synthetic peptide
QVQLVESGGGVVQPGRSLRLSCAASGFTFSSYGMHWVRQAPGKCLEWVAVISYDGSNKYYADSVKGRFTISRDNSKNTLYLQMNSLRAEDTAVYYCARGRYYGSGSYNYGMDVWGQGTTVTVSS

SEQ ID NO: 708 - protein, 107 aa, Artificial Sequence
  Synthetic peptide
DIQMTQSPSSLSASVGDRVTITCRASQSIFDYLNWYQQKPGKAPKLLIYAASSLQSGVPSRFSGSGFGTDFTLTISSLQPEDFATYYCQQSYSTPLTFGCGTKLEIK

SEQ ID NO: 709 - protein, 246 aa, Artificial Sequence
  Synthetic peptide
QVQLVESGGGVVQPGRSLRLSCAASGFTFSSYGMHWVRQAPGKCLEWVAVISYDGSNKYYADSVKGRFTISRDNSKNTLYLQMNSLRAEDTAVYYCARGRYYGSGSYNYGMDVWGQGTTVTVSSGGGGSGGGGSGGGGSDIQMTQSPSSLSASVGDRVTITCRASQSIFDYLNWYQQKPGKAPKLLIYAASSLQSGVPSRFSGSGFGTDFTLTISSLQPEDFATYYCQQSYSTPLTFGCGTKLEIK

SEQ ID NO: 710 - protein, 501 aa, Artificial Sequence
  Synthetic peptide
QVQLVESGGGVVQPGRSLRLSCAASGFTFSSYGMHWVRQAPGKCLEWVAVISYDGSNKYYADSVKGRFTISRDNSKNTLYLQMNSLRAEDTAVYYCARGRYYGSGSYNYGMDVWGQGTTVTVSSGGGGSGGGGSGGGGSDIQMTQSPSSLSASVGDRVTITCRASQSIFDYLNWYQQKPGKAPKLLIYAASSLQSGVPSRFSGSGFGTDFTLTISSLQPEDFATYYCQQSYSTPLTFGCGTKLEIKSGGGGSEVQLVESGGGLVQPGGSLKLSCAASGFTFNKYAMNWVRQAPGKGLEWVARIRSKYNNYATYYADSVKDRFTISRDDSKNTAYLQMNNLKTEDTAVYYCVRHGNFGNSYISYWAYWGQGTLVTVSSGGGGSGGGGSGGGGSQTVVTQEPSLTVSPGGTVTLTCGSSTGAVTSGNYPNWVQQKPGQAPRGLIGGTKFLAPGTPARFSGSLLGGKAALTLSGVQPEDEAEYYCVLWYSNRWVFGGGTKLTVL

SEQ ID NO: 711 - protein, 5 aa, Artificial Sequence
  Synthetic peptide
TYYWS

SEQ ID NO: 712 - protein, 16 aa, Artificial Sequence
  Synthetic peptide
RIYPTGITNYNPSLKS

SEQ ID NO: 713 - protein, 17 aa, Artificial Sequence
  Synthetic peptide
DRRFLEPSYYYYYGMDV

SEQ ID NO: 714 - protein, 16 aa, Artificial Sequence
  Synthetic peptide
RSSQSLLHSNGYNYLD

SEQ ID NO: 715 - protein, 7 aa, Artificial Sequence
  Synthetic peptide
LGSNRAS

SEQ ID NO: 716 - protein, 9 aa, Artificial Sequence
  Synthetic peptide
MQGLRTPFT

SEQ ID NO: 717 - protein, 125 aa, Artificial Sequence
  Synthetic peptide
QVQLQESGPGLVKPSETLSLTCTVSGDSISTYYWSWIRQPAGKCLEWIGRIYPTGITNYNPSLKSRVTISVDTSKNQFSLKLSSVTAADTAVYYCARDRRFLEPSYYYYYGMDVWGQGTTVTVSS

SEQ ID NO: 718 - protein, 112 aa, Artificial Sequence
  Synthetic peptide
DIVLTQSPLSLPVTPGEPASISCRSSQSLLHSNGYNYLDWYLQKPGQSPQLLIYLGSNRASGVPDRFSGSVSGTDFTLKISRVEAEDVGVYYCMQGLRTPFTFGCGTKLEIK

SEQ ID NO: 719 - protein, 252 aa, Artificial Sequence
  Synthetic peptide
QVQLQESGPGLVKPSETLSLTCTVSGDSISTYYWSWIRQPAGKCLEWIGRIYPTGITNYNPSLKSRVTISVDTSKNQFSLKLSSVTAADTAVYYCARDRRFLEPSYYYYYGMDVWGQGTTVTVSSGGGGSGGGGSGGGGSDIVLTQSPLSLPVTPGEPASISCRSSQSLLHSNGYNYLDWYLQKPGQSPQLLIYLGSNRASGVPDRFSGSVSGTDFTLKISRVEAEDVGVYYCMQGLRTPFTFGCGTKLEIK

SEQ ID NO: 720 - protein, 507 aa, Artificial Sequence
  Synthetic peptide
QVQLQESGPGLVKPSETLSLTCTVSGDSISTYYWSWIRQPAGKCLEWIGRIYPTGITNYNPSLKSRVTISVDTSKNQFSLKLSSVTAADTAVYYCARDRRFLEPSYYYYYGMDVWGQGTTVTVSSGGGGSGGGGSGGGGSDIVLTQSPLSLPVTPGEPASISCRSSQSLLHSNGYNYLDWYLQKPGQSPQLLIYLGSNRASGVPDRFSGSVSGTDFTLKISRVEAEDVGVYYCMQGLRTPFTFGCGTKLEIKSGGGGSEVQLVESGGGLVQPGGSLKLSCAASGFTFNKYAMNWVRQAPGKGLEWVARIRSKYNNYATYYADSVKDRFTISRDDSKNTAYLQMNNLKTEDTAVYYCVRHGNFGNSYISYWAYWGQGTLVTVSSGGGGSGGGGSGGGGSQTVVTQEPSLTVSPGGTVTLTCGSSTGAVTSGNYPNWVQQKPGQAPRGLIGGTKFLAPGTPARFSGSLLGGKAALTLSGVQPEDEAEYYCVLWYSNRWVFGGGTKLTVL

SEQ ID NO: 721 - protein, 5 aa, Artificial Sequence
  Synthetic peptide
SYSMN

SEQ ID NO: 722 - protein, 17 aa, Artificial Sequence
  Synthetic peptide
YISSSGGYIYYADSVKG

SEQ ID NO: 723 - protein, 11 aa, Artificial Sequence
  Synthetic peptide
GDYSNYAYFDY

SEQ ID NO: 724 - protein, 11 aa, Artificial Sequence
  Synthetic peptide
RASQGISNYLA

SEQ ID NO: 725 - protein, 7 aa, Artificial Sequence
  Synthetic peptide
AASTLQS

SEQ ID NO: 726 - protein, 9 aa, Artificial Sequence
  Synthetic peptide
QQYYSTPLT

SEQ ID NO: 727 - protein, 120 aa, Artificial Sequence
  Synthetic peptide
EVQLVESGGGLVKPGGSLRLSCAASGFTFSSYSMNWVRQAPGKCLEWVSYISSSGGYIYYADSVKGRFTISRDNAKNSLYLQMNSLRAEDAAVYYCSRGDYSNYAYFDYWGQGTLVTVSS

SEQ ID NO: 728 - protein, 107 aa, Artificial Sequence
  Synthetic peptide
DIQMTQSPSSLSASVGDRVTITCRASQGISNYLAWYQQKPGKVPKLLIYAASTLQSGVPSRFSGSGSGTDFTLTISSLQAEDVAVYYCQQYYSTPLTFGCGTKVEIK

SEQ ID NO: 729 - protein, 242 aa, Artificial Sequence
  Synthetic peptide
EVQLVESGGGLVKPGGSLRLSCAASGFTFSSYSMNWVRQAPGKCLEWVSYISSSGGYIYYADSVKGRFTISRDNAKNSLYLQMNSLRAEDAAVYYCSRGDYSNYAYFDYWGQGTLVTVSSGGGGSGGGGSGGGGSDIQMTQSPSSLSASVGDRVTITCRASQGISNYLAWYQQKPGKVPKLLIYAASTLQSGVPSRFSGSGSGTDFTLTISSLQAEDVAVYYCQQYYSTPLTFGCGTKVEIK

SEQ ID NO: 730 - protein, 497 aa, Artificial Sequence
  Synthetic peptide
EVQLVESGGGLVKPGGSLRLSCAASGFTFSSYSMNWVRQAPGKCLEWVSYISSSGGYIYYADSVKGRFTISRDNAKNSLYLQMNSLRAEDAAVYYCSRGDYSNYAYFDYWGQGTLVTVSSGGGGSGGGGSGGGGSDIQMTQSPSSLSASVGDRVTITCRASQGISNYLAWYQQKPGKVPKLLIYAASTLQSGVPSRFSGSGSGTDFTLTISSLQAEDVAVYYCQQYYSTPLTFGCGTKVEIKSGGGGSEVQLVESGGGLVQPGGSLKLSCAASGFTFNKYAMNWVRQAPGKGLEWVARIRSKYNNYATYYADSVKDRFTISRDDSKNTAYLQMNNLKTEDTAVYYCVRHGNFGNSYISYWAYWGQGTLVTVSSGGGGSGGGGSGGGGSQTVVTQEPSLTVSPGGTVTLTCGSSTGAVTSGNYPNWVQQKPGQAPRGLIGGTKFLAPGTPARFSGSLLGGKAALTLSGVQPEDEAEYYCVLWYSNRWVFGGGTKLTVL

SEQ ID NO: 731 - protein, 5 aa, Artificial Sequence
  Synthetic peptide
SYAMS

SEQ ID NO: 732 - protein, 17 aa, Artificial Sequence
  Synthetic peptide
AISGSGGSTFYADSVQG

SEQ ID NO: 733 - protein, 11 aa, Artificial Sequence
  Synthetic peptide
HDYSNYPYFDY

SEQ ID NO: 734 - protein, 12 aa, Artificial Sequence
  Synthetic peptide
RASQSVRGNYLA

SEQ ID NO: 735 - protein, 7 aa, Artificial Sequence
  Synthetic peptide
GASSRAT

SEQ ID NO: 736 - protein, 9 aa, Artificial Sequence
  Synthetic peptide
QQYGYSPFT

SEQ ID NO: 737 - protein, 120 aa, Artificial Sequence
  Synthetic peptide
EVQLLESGGGLVQPGGSLRLSCAASGFTFSSYAMSWVRQAPGKGLEWVSAISGSGGSTFYADSVQGRFTISRDNSKNTLYLQVNSLRAEDTAVYYCARHDYSNYPYFDYWGQGTLVTVSS

SEQ ID NO: 738 - protein, 108 aa, Artificial Sequence
  Synthetic peptide
EIVLTQSPGTLSLSPGERATLSCRASQSVRGNYLAWYQQKPGQAPRLLIYGASSRATGIPDRFSGSGSGTDFTLTISRLEPEDFAVYYCQQYGYSPFTFGPGTKVDIK

SEQ ID NO: 739 - protein, 243 aa, Artificial Sequence
  Synthetic peptide
EVQLLESGGGLVQPGGSLRLSCAASGFTFSSYAMSWVRQAPGKGLEWVSAISGSGGSTFYADSVQGRFTISRDNSKNTLYLQVNSLRAEDTAVYYCARHDYSNYPYFDYWGQGTLVTVSSGGGGSGGGGSGGGGSEIVLTQSPGTLSLSPGERATLSCRASQSVRGNYLAWYQQKPGQAPRLLIYGASSRATGIPDRFSGSGSGTDFTLTISRLEPEDFAVYYCQQYGYSPFTFGPGTKVDIK

SEQ ID NO: 740 - protein, 498 aa, Artificial Sequence
  Synthetic peptide
EVQLLESGGGLVQPGGSLRLSCAASGFTFSSYAMSWVRQAPGKGLEWVSAISGSGGSTFYADSVQGRFTISRDNSKNTLYLQVNSLRAEDTAVYYCARHDYSNYPYFDYWGQGTLVTVSSGGGGSGGGGSGGGGSEIVLTQSPGTLSLSPGERATLSCRASQSVRGNYLAWYQQKPGQAPRLLIYGASSRATGIPDRFSGSGSGTDFTLTISRLEPEDFAVYYCQQYGYSPFTFGPGTKVDIKSGGGGSEVQLVESGGGLVQPGGSLKLSCAASGFTFNKYAMNWVRQAPGKGLEWVARIRSKYNNYATYYADSVKDRFTISRDDSKNTAYLQMNNLKTEDTAVYYCVRHGNFGNSYISYWAYWGQGTLVTVSSGGGGSGGGGSGGGGSQTVVTQEPSLTVSPGGTVTLTCGSSTGAVTSGNYPNWVQQKPGQAPRGLIGGTKFLAPGTPARFSGSLLGGKAALTLSGVQPEDEAEYYCVLWYSNRWVFGGGTKLTVL

SEQ ID NO: 741 - protein, 193 aa, Homo sapiens
MPEEGSGCSVRRRPYGCVLRAALVPLVAGLVICLVVCIQRFAQAQQQLPLESLGWDVAELQLNHTGPQQDPRLYWQGGPALGRSFLHGPELDKGQLRIHRDGIYMVHIQVTLAICSSTTASRHHPTTLAVGICSPASRSISLLRLSFHQGCTIASQRLTPLARGDTLCTNLTGTLLPSRNTDETFFGVQWVRP

SEQ ID NO: 742 - protein, 151 aa, Homo sapiens
QAQQQLPLESLGWDVAELQLNHTGPQQDPRLYWQGGPALGRSFLHGPELDKGQLRIHRDGIYMVHIQVTLAICSSTTASRHHPTTLAVGICSPASRSISLLRLSFHQGCTIASQRLTPLARGDTLCTNLTGTLLPSRNTDETFFGVQWVRP

SEQ ID NO: 743 - protein, 20 aa, Homo sapiens
QAQQQLPLESLGWDVAELQL

SEQ ID NO: 744 - protein, 22 aa, Homo sapiens
NHTGPQQDPRLYWQGGPALGRS

SEQ ID NO: 745 - protein, 25 aa, Homo sapiens
FLHGPELDKGQLRIHRDGIYMVHIQ

SEQ ID NO: 746 - protein, 25 aa, Homo sapiens
VTLAICSSTTASRHHPTTLAVGICS

SEQ ID NO: 747 - protein, 17 aa, Homo sapiens
PASRSISLLRLSFHQGC

SEQ ID NO: 748 - protein, 24 aa, Homo sapiens
TIASQRLTPLARGDTLCTNLTGTL

SEQ ID NO: 749 - protein, 18 aa, Homo sapiens
LPSRNTDETFFGVQWVRP

SEQ ID NO: 750 - protein, 42 aa, Homo sapiens
QAQQQLPLESLGWDVAELQLNHTGPQQDPRLYWQGGPALGRS

SEQ ID NO: 751 - protein, 50 aa, Homo sapiens
FLHGPELDKGQLRIHRDGIYMVHIQVTLAICSSTTASRHHPTTLAVGICS

SEQ ID NO: 752 - protein, 42 aa, Homo sapiens
VTLAICSSTTASRHHPTTLAVGICSPASRSISLLRLSFHQGC

SEQ ID NO: 753 - protein, 41 aa, Homo sapiens
PASRSISLLRLSFHQGCTIASQRLTPLARGDTLCTNLTGTL

SEQ ID NO: 754 - protein, 42 aa, Homo sapiens
TIASQRLTPLARGDTLCTNLTGTLLPSRNTDETFFGVQWVRP

SEQ ID NO: 755 - protein, 194 aa, Macaca fascicularis
MPEEGSGCAVRRRPYACVLRAAVVPLVAGLAICLVVCVQRLSRAQQQLPLESLGWDIAELQLNHTGPQQDPRLYWQGGPALGRSFLRGPELDKGQLRIRRDGIYMVHIQVTLAICSSTSTSRHHHPTTLAVGICSPASRSISLLRLSFHQGCTIASQRLTPLARGDTLCTNLTGTLLPSRNTDETFFGVQWVRP

SEQ ID NO: 756 - protein, 152 aa, Macaca fascicularis
RAQQQLPLESLGWDIAELQLNHTGPQQDPRLYWQGGPALGRSFLRGPELDKGQLRIRRDGIYMVHIQVTLAICSSTSTSRHHHPTTLAVGICSPASRSISLLRLSFHQGCTIASQRLTPLARGDTLCTNLTGTLLPSRNTDETFFGVQWVRP

SEQ ID NO: 757 - protein, 195 aa, Mus musculus
MPEEGRPCPWVRWSGTAFQRQWPWLLLVVFITVFCCWFHCSGLLSKQQQRLLEHPEPHTAELQLNLTVPRKDPTLRWGAGPALGRSFTHGPELEEGHLRIHQDGLYRLHIQVTLANCSSPGSTLQHRATLAVGICSPAAHGISLLRGRFGQDCTVALQRLTYLVHGDVLCTNLTLPLLPSRNADETFFGVQWICP

SEQ ID NO: 758 - protein, 151 aa, Mus musculus
SKQQQRLLEHPEPHTAELQLNLTVPRKDPTLRWGAGPALGRSFTHGPELEEGHLRIHQDGLYRLHIQVTLANCSSPGSTLQHRATLAVGICSPAAHGISLLRGRFGQDCTVALQRLTYLVHGDVLCTNLTLPLLPSRNADETFFGVQWICP

SEQ ID NO: 759 - protein, 212 aa, Artificial Sequence
  Synthetic peptide
MPEEGSGCSVRRRPYGCVLRAALVPLVAGLVICLVVCIQRFASKQQQRLLEHPEPHTAELQLNHTGPQQDPRLYWQGGPALGRSFLHGPELDKGQLRIHRDGIYMVHIQVTLAICSSTTASRHHPTTLAVGICSPASRSISLLRLSFHQGCTIASQRLTPLARGDTLCTNLTGTLLPSRNTDETFFGVQWVRPGGGGSGKPIPNPLLGLDST

SEQ ID NO: 760 - protein, 212 aa, Artificial Sequence
  Synthetic peptide
MPEEGSGCSVRRRPYGCVLRAALVPLVAGLVICLVVCIQRFAQAQQQLPLESLGWDVAELQLNLTVPRKDPTLRWGAGPALGRSFLHGPELDKGQLRIHRDGIYMVHIQVTLAICSSTTASRHHPTTLAVGICSPASRSISLLRLSFHQGCTIASQRLTPLARGDTLCTNLTGTLLPSRNTDETFFGVQWVRPGGGGSGKPIPNPLLGLDST

SEQ ID NO: 761 - protein, 212 aa, Artificial Sequence
  Synthetic peptide
MPEEGSGCSVRRRPYGCVLRAALVPLVAGLVICLVVCIQRFAQAQQQLPLESLGWDVAELQLNHTGPQQDPRLYWQGGPALGRSFTHGPELEEGHLRIHQDGLYRLHIQVTLAICSSTTASRHHPTTLAVGICSPASRSISLLRLSFHQGCTIASQRLTPLARGDTLCTNLTGTLLPSRNTDETFFGVQWVRPGGGGSGKPIPNPLLGLDST

SEQ ID NO: 762 - protein, 212 aa, Artificial Sequence
  Synthetic peptide
MPEEGSGCSVRRRPYGCVLRAALVPLVAGLVICLVVCIQRFAQAQQQLPLESLGWDVAELQLNHTGPQQDPRLYWQGGPALGRSFLHGPELDKGQLRIHRDGIYMVHIQVTLANCSSPGSTLQHRATLAVGICSPASRSISLLRLSFHQGCTIASQRLTPLARGDTLCTNLTGTLLPSRNTDETFFGVQWVRPGGGGSGKPIPNPLLGLDST

SEQ ID NO: 763 - protein, 212 aa, Artificial Sequence
  Synthetic peptide
MPEEGSGCSVRRRPYGCVLRAALVPLVAGLVICLVVCIQRFAQAQQQLPLESLGWDVAELQLNHTGPQQDPRLYWQGGPALGRSFLHGPELDKGQLRIHRDGIYMVHIQVTLAICSSTTASRHHPTTLAVGICSPASRSISLLRLSFHQGCTVALQRLTYLVHGDVLCTNLTLPLLPSRNTDETFFGVQWVRPGGGGSGKPIPNPLLGLDST

SEQ ID NO: 764 - protein, 212 aa, Artificial Sequence
  Synthetic peptide
MPEEGSGCSVRRRPYGCVLRAALVPLVAGLVICLVVCIQRFAQAQQQLPLESLGWDVAELQLNHTGPQQDPRLYWQGGPALGRSFLHGPELDKGQLRIHRDGIYMVHIQVTLAICSSTTASRHHPTTLAVGICSPASRSISLLRLSFHQGCTIASQRLTPLARGDTLCTNLTGTLLPSRNADETFFGVQWICPGGGGSGKPIPNPLLGLDST

SEQ ID NO: 765 - protein, 212 aa, Artificial Sequence
  Synthetic peptide
MPEEGSGCSVRRRPYGCVLRAALVPLVAGLVICLVVCIQRFASKQQQRLLEHPEPHTAELQLNLTVPRKDPTLRWGAGPALGRSFLHGPELDKGQLRIHRDGIYMVHIQVTLAICSSTTASRHHPTTLAVGICSPASRSISLLRLSFHQGCTIASQRLTPLARGDTLCTNLTGTLLPSRNTDETFFGVQWVRPGGGGSGKPIPNPLLGLDST

SEQ ID NO: 766 - protein, 212 aa, Artificial Sequence
  Synthetic peptide
MPEEGSGCSVRRRPYGCVLRAALVPLVAGLVICLVVCIQRFAQAQQQLPLESLGWDVAELQLNHTGPQQDPRLYWQGGPALGRSFTHGPELEEGHLRIHQDGLYRLHIQVTLANCSSPGSTLQHRATLAVGICSPASRSISLLRLSFHQGCTIASQRLTPLARGDTLCTNLTGTLLPSRNTDETFFGVQWVRPGGGGSGKPIPNPLLGLDST

SEQ ID NO: 767 - protein, 212 aa, Artificial Sequence
  Synthetic peptide
MPEEGSGCSVRRRPYGCVLRAALVPLVAGLVICLVVCIQRFAQAQQQLPLESLGWDVAELQLNHTGPQQDPRLYWQGGPALGRSFLHGPELDKGQLRIHRDGIYMVHIQVTLANCSSPGSTLQHRATLAVGICSPAAHGISLLRGRFGQDCTIASQRLTPLARGDTLCTNLTGTLLPSRNTDETFFGVQWVRPGGGGSGKPIPNPLLGLDST

SEQ ID NO: 768 - protein, 212 aa, Artificial Sequence
  Synthetic peptide
MPEEGSGCSVRRRPYGCVLRAALVPLVAGLVICLVVCIQRFAQAQQQLPLESLGWDVAELQLNHTGPQQDPRLYWQGGPALGRSFLHGPELDKGQLRIHRDGIYMVHIQVTLAICSSTTASRHHPTTLAVGICSPASRSISLLRLSFHQGCTVALQRLTYLVHGDVLCTNLTLPLLPSRNADETFFGVQWICPGGGGSGKPIPNPLLGLDST

SEQ ID NO: 769 - protein, 261 aa, Homo sapiens
MIETYNQTSPRSAATGLPISMKIFMYLLTVFLITQMIGSALFAVYLHRRLDKIEDERNLHEDFVFMKTIQRCNTGERSLSLLNCEEIKSQFEGFVKDIMLNKEETKKENSFEMQKGDQNPQIAAHVISEASSKTTSVLQWAEKGYYTMSNNLVTLENGKQLTVKRQGLYYIYAQVTFCSNREASSQAPFIASLCLKSPGRFERILLRAANTHSSAKPCGQQSIHLGGVFELQPGASVFVNVTDPSQVSHGTGFTSFGLLKL

SEQ ID NO: 770 - protein, 4 aa, Artificial Sequence
  Synthetic peptide
GGGG

SEQ ID NO: 771 - protein, 5 aa, Artificial Sequence
  Synthetic peptide
GGGGS

SEQ ID NO: 772 - protein, 5 aa, Artificial Sequence
  Synthetic peptide
GGGGQ

SEQ ID NO: 773 - protein, 6 aa, Artificial Sequence
  Synthetic peptide
SGGGGS

SEQ ID NO: 774 - protein, 6 aa, Artificial Sequence
  Synthetic peptide
PGGGGS

SEQ ID NO: 775 - protein, 6 aa, Artificial Sequence
  Synthetic peptide
PGGDGS

SEQ ID NO: 776 - protein, 9 aa, Artificial Sequence
  Synthetic peptide
GGGGSGGGS

SEQ ID NO: 777 - protein, 10 aa, Artificial Sequence
  Synthetic peptide
GGGGSGGGGS

SEQ ID NO: 778 - protein, 15 aa, Artificial Sequence
  Synthetic peptide
GGGGSGGGGSGGGGS

SEQ ID NO: 779 - protein, 6 aa, Artificial Sequence
  Synthetic peptide
HHHHHH

SEQ ID NO: 780 - protein, 16 aa, Artificial Sequence
  Synthetic peptide
RDWDFDVFGGGTPVGG

SEQ ID NO: 781 - protein, 16 aa, Artificial Sequence
  Synthetic peptide
  misc_feature (12)..(12): Xaa can be any naturally occurring amino acid
QRFVTGHFGGLXPANG

SEQ ID NO: 782 - protein, 16 aa, Artificial Sequence
  Synthetic peptide
QRFVTGHFGGLYPANG

SEQ ID NO: 783 - protein, 16 aa, Artificial Sequence
  Synthetic peptide
QRFVTGHFGGLHPANG

SEQ ID NO: 784 - protein, 9 aa, Artificial Sequence
  Synthetic peptide
TGHFGGLHP

SEQ ID NO: 785 - protein, 16 aa, Artificial Sequence
  Synthetic peptide
QRFCTGHFGGLHPCNG

SEQ ID NO: 786 - protein, 585 aa, Homo sapiens [sequence omitted]

SEQ ID NO: 787 - protein, 585 aa, Artificial Sequence
  Synthetic peptide
DAHKSEVAHRFKDLGEENFKALVLIAFAQYLQQCPFEDHVKLVNEVTEFAKTCVADESAENCDKSLHTLFGDKLCTVATLRETYGEMADCCAKQEPERNECFLQHKDDNPNLPRLVRPEVDVMCTAFHDNEETFLKKYLYEIARRHPYFYAPELLFFAKRYKAAFTECCQAADKAACLLPKLDELRDEGKASSAKQRLKCASLQKFGERAFKAWAVARLSQRFPKAEFAEVSKLVTDLTKVHTECCHGDLLECADDRADLAKYICENQDSISSKLKECCEKPLLEKSHCIAEVENDEMPADLPSLAADFVESKDVCKNYAEAKDVFLGMFLYEYARRHPDYSVVLLLRLAKTYETTLEKCCAAADPHECYAKVFDEFKPLVEEPQNLIKQNCELFEQLGEYKFQNALLVRYTKKVPQVSTPTLVEVSRNLGKVGSKCCKHPEAKRMPCAEDYLSVVLNQLCVLHEKTPVSDRVTKCCTESLVNRRPCFSALEVDETYVPKEFNAGTFTFHADICTLSEKERQIKKQTALVELVKHKPKATKEQLKAAMDDFAAFVEKCCKADDKETCFAEEGKKLVAASQAALGL

SEQ ID NO: 788 - protein, 585 aa, Artificial Sequence
  Synthetic peptide
DAHKSEVAHRFKDLGEENFKALVLIAFAQYLQQCPFEDHVKLVNEVTEFAKTCVADESAENCDKSLHTLFGDKLCTVATLRETYGEMADCCAKQEPERNECFLQHKDDNPNLPRLVRPEVDVMCTAFHDNEETFLKKYLYEIARRHPYFYAPELLFFAKRYKAAFTECCQAADKAACLLPKLDELRDEGKASSAKQRLKCASLQKFGERAFKAWAVARLSQRFPKAEFAEVSKLVTDLTKVHTECCHGDLLECADDRADLAKYICENQDSISSKLKECCEKPLLEKSHCIAEVENDEMPADLPSLAADFVESKDVCKNYAEAKDVFLGMFLYEYARRHPDYSVVLLLRLAKTYETTLEKCCAAADPHECYAKVFDEFKPLVEEPQNLIKQNCELFEQLGEYKFQNALLVRYTKKVPQVSTPTLVEVSRNLGKVGSKCCKHPEAKRMPCAEDYLSVVLNQLCVLHEKTPVSDRVTKCCTESLVNRRPCFSALEVDETYVPKEFNAETFTFHADICTLSEKERQIKKQTALVELVKHKPKATKEQLKAVMDDFAAFVEKCCKADDKETCFAEEGPKLVAASQAALGL

SEQ ID NO: 789 - protein, 585 aa, Artificial Sequence
  Synthetic peptide
DAHKSEVAHRFKDLGEENFKALVLIAFAQYLQQCPFEDHVKLVNEVTEFAKTCVADESAENCDKSLHTLFGDKLCTVATLRETYGEMADCCAKQEPERNECFLQHKDDNPNLPRLVRPEVDVMCTAFHDNEETFLKKYLYEIARRHPYFYAPELLFFAKRYKAAFTECCQAADKAACLLPKLDELRDEGKASSAKQRLKCASLQKFGERAFKAWAVARLSQRFPKAEFAEVSKLVTDLTKVHTECCHGDLLECADDRADLAKYICENQDSISSKLKECCEKPLLEKSHCIAEVENDEMPADLPSLAADFVESKDVCKNYAEAKDVFLGMFLYEYARRHPDYSVVLLLRLAKTYETTLEKCCAAADPHECYAKVFDEFKPLVEEPQNLIKQNCELFEQLGEYKFQNALLVRYTKKVPQVSTPTLVEVSRNLGKVGSKCCKHPEAKRMPCAEDYLSVVLNQLCVLHEKTPVSDRVTKCCTESLVNRRPCFSALDVDETYVPKEFNAETFTFHADICTLSEKERQIKKQTALVELVKHKPKATKEQLKAVMDDFAAFVEKCCKADDKETCFAEEGPHLVAASKAALGL

SEQ ID NO: 790 - protein, 585 aa, Artificial Sequence
  Synthetic peptide
DAHKSEVAHRFKDLGEENFKALVLIAFAQYLQQCPFEDHVKLVNEVTEFAKTCVADESAENCDKSLHTLFGDKLCTVATLRETYGEMADCCAKQEPERNECFLQHKDDNPNLPRLVRPEVDVMCTAFHDNEETFLKKYLYEIARRHPYFYAPELLFFAKRYKAAFTECCQAADKAACLLPKLDELRDEGKASSAKQRLKCASLQKFGERAFKAWAVARLSQRFPKAEFAEVSKLVTDLTKVHTECCHGDLLECADDRADLAKYICENQDSISSKLKECCEKPLLEKSHCIAEVENDEMPADLPSLAADFVESKDVCKNYAEAKDVFLGMFLYEYARRHPDYSVVLLLRLAKTYETTLEKCCAAADPHECYAKVFDEFKPLVEEPQNLIKQNCELFEQLGEYKFQNALLVRYTKKVPQVSTPTLVEVSRNLGKVGSKCCKHPEAKRMPCAEDYLSVVLNQLCVLHEKTPVSDRVTKCCTESLVNRRPCFSALGVDETYVPKEFNAETFTFHADICTLSEKERQIKKQTALVELVKHKPKATKEQLKAVMDKFAAFVEKCCKADDKETCFAEEGPKLVAASQAALGL

SEQ ID NO: 791 - protein, 585 aa, Artificial Sequence
  Synthetic peptide
DAHKSEVAHRFKDLGEENFKALVLIAFAQYLQQCPFEDHVKLVNEVTEFAKTCVADESAENCDKSLHTLFGDKLCTVATLRETYGEMADCCAKQEPERNECFLQHKDDNPNLPRLVRPEVDVMCTAFHDNEETFLKKYLYEIARRHPYFYAPELLFFAKRYKAAFTECCQAADKAACLLPKLDELRDEGKASSAKQRLKCASLQKFGERAFKAWAVARLSQRFPKAEFAEVSKLVTDLTKVHTECCHGDLLECADDRADLAKYICENQDSISSKLKECCEKPLLEKSHCIAEVENDEMPADLPSLAADFVESKDVCKNYAEAKDVFLGMFLYEYARRHPDYSVVLLLRLAKTYETTLEKCCAAADPHECYAKVFDEFKPLVEEPQNLIKQNCELFEQLGEYKFQNALLVRYTKKVPQVSTPTLVEVSRNLGKVGSKCCKHPEAKRMPCAEDYLSVVLNQLCVLHEKTPVSDRVTKCCTESLVNRRPCFSALDVDETYVPKEFNAETFTFHADICTLSEKERQIKKQTALVELVKHKPKATKEQLKAVMDKFAAFVEKCCKADDKETCFAEEGPKLVAASQAALGL

SEQ ID NO: 792 - protein, 585 aa, Artificial Sequence
  Synthetic peptide
DAHKSEVAHRFKDLGEENFKALVLIAFAQYLQQCPFEDHVKLVNEVTEFAKTCVADESAENCDKSLHTLFGDKLCTVATLRETYGEMADCCAKQEPERNECFLQHKDDNPNLPRLVRPEVDVMCTAFHDNEETFLKKYLYEIARRHPYFYAPELLFFAKRYKAAFTECCQAADKAACLLPKLDELRDEGKASSAKQRLKCASLQKFGERAFKAWAVARLSQRFPKAEFAEVSKLVTDLTKVHTECCHGDLLECADDRADLAKYICENQDSISSKLKECCEKPLLEKSHCIAEVENDEMPADLPSLAADFVESKDVCKNYAEAKDVFLGMFLYEYARRHPDYSVVLLLRLAKTYETTLEKCCAAADPHECYAKVFDEFKPLVEEPQNLIKQNCELFEQLGEYKFQNALLVRYTKKVPQVSTPTLVEVSRNLGKVGSKCCKHPEAKRMPCAEDYLSVVLNQLCVLHEKTPVSDRVTKCCTESLVNRRPCFSALEVDETYVPKEFNAETFTFHADICTLSEKERQIKKQTALVELVKHKPKATKEQLKAVMDKFAAFVEKCCKADDKETCFAEEGPHLVAASQAALGL

SEQ ID NO: 793 - protein, 585 aa, Artificial Sequence
  Synthetic peptide
DAHKSEVAHRFKDLGEENFKALVLIAFAQYLQQCPFEDHVKLVNEVTEFAKTCVADESAENCDKSLHTLFGDKLCTVATLRETYGEMADCCAKQEPERNECFLQHKDDNPNLPRLVRPEVDVMCTAFHDNEETFLKKYLYEIARRHPYFYAPELLFFAKRYKAAFTECCQAADKAACLLPKLDELRDEGKASSAKQRLKCASLQKFGERAFKAWAVARLSQRFPKAEFAEVSKLVTDLTKVHTECCHGDLLECADDRADLAKYICENQDSISSKLKECCEKPLLEKSHCIAEVENDEMPADLPSLAADFVESKDVCKNYAEAKDVFLGMFLYEYARRHPDYSVVLLLRLAKTYETTLEKCCAAADPHECYAKVFDEFKPLVEEPQNLIKQNCELFEQLGEYKFQNALLVRYTKKVPQVSTPTLVEVSRNLGKVGSKCCKHPEAKRMPCAEDYLSVVLNQLCVLHEKTPVSDRVTKCCTESLVNRRPCFSALEVDETYVPKEFNAETFTFHADICTLSEKERQIKKQTALVELVKHKPKATKEQLKAVMDDFAAFVEKCCKADDKETCFAEEGPHLVAASKAALGL

SEQ ID NO: 794 - protein, 585 aa, Artificial Sequence
  Synthetic peptide
DAHKSEVAHRFKDLGEENFKALVLIAFAQYLQQCPFEDHVKLVNEVTEFAKTCVADESAENCDKSLHTLFGDKLCTVATLRETYGEMADCCAKQEPERNECFLQHKDDNPNLPRLVRPEVDVMCTAFHDNEETFLKKYLYEIARRHPYFYAPELLFFAKRYKAAFTECCQAADKAACLLPKLDELRDEGKASSAKQRLKCASLQKFGERAFKAWAVARLSQRFPKAEFAEVSKLVTDLTKVHTECCHGDLLECADDRADLAKYICENQDSISSKLKECCEKPLLEKSHCIAEVENDEMPADLPSLAADFVESKDVCKNYAEAKDVFLGMFLYEYARRHPDYSVVLLLRLAKTYETTLEKCCAAADPHECYAKVFDEFKPLVEEPQNLIKQNCELFEQLGEYKFQNALLVRYTKKVPQVSTPTLVEVSRNLGKVGSKCCKHPEAKRMPCAEDYLSVVLNQLCVLHEKTPVSDRVTKCCTESLVNRRPCFSALEVDETYVPKEFNAETFTFHADICTLSEKERQIKKQTALVELVKHKPKATKEQLKAVMDKFAAFVEKCCKADDKETCFAEEGPKLVAASKAALGL

SEQ ID NO: 795 - protein, 585 aa, Artificial Sequence
  Synthetic peptide
DAHKSEVAHRFKDLGEENFKALVLIAFAQYLQQCPFEDHVKLVNEVTEFAKTCVADESAENCDKSLHTLFGDKLCTVATLRETYGEMADCCAKQEPERNECFLQHKDDNPNLPRLVRPEVDVMCTAFHDNEETFLKKYLYEIARRHPYFYAPELLFFAKRYKAAFTECCQAADKAACLLPKLDELRDEGKASSAKQRLKCASLQKFGERAFKAWAVARLSQRFPKAEFAEVSKLVTDLTKVHTECCHGDLLECADDRADLAKYICENQDSISSKLKECCEKPLLEKSHCIAEVENDEMPADLPSLAADFVESKDVCKNYAEAKDVFLGMFLYEYARRHPDYSVVLLLRLAKTYETTLEKCCAAADPHECYAKVFDEFKPLVEEPQNLIKQNCELFEQLGEYKFQNALLVRYTKKVPQVSTPTLVEVSRNLGKVGSKCCKHPEAKRMPCAEDYLSVVLNQLCVLHEKTPVSDRVTKCCTESLVNRRPCFSALDVDETYVPKEFNAETFTFHADICTLSEKERQIKKQTALVELVKHKPKATKEQLKAVMDDFAAFVEKCCKADDKETCFAEEGPKLVAASKAALGL

SEQ ID NO: 796 - protein, 585 aa, Artificial Sequence
  Synthetic peptide
DAHKSEVAHRFKDLGEENFKALVLIAFAQYLQQSPFEDHVKLVNEVTEFAKTCVADESAENCDKSLHTLFGDKLCTVATLRETYGEMADCCAKQEPERNECFLQHKDDNPNLPRLVRPEVDVMCTAFHDNEETFLKKYLYEIARRHPYFYAPELLFFAKRYKAAFTECCQAADKAACLLPKLDELRDEGKASSAKQRLKCASLQKFGERAFKAWAVARLSQRFPKAEFAEVSKLVTDLTKVHTECCHGDLLECADDRADLAKYICENQDSISSKLKECCEKPLLEKSHCIAEVENDEMPADLPSLAADFVESKDVCKNYAEAKDVFLGMFLYEYARRHPDYSVVLLLRLAKTYETTLEKCCAAADPHECYAKVFDEFKPLVEEPQNLIKQNCELFEQLGEYKFQNALLVRYTKKVPQVSTPTLVEVSRNLGKVGSKCCKHPEAKRMPCAEDYLSVVLNQLCVLHEKTPVSDRVTKCCTESLVNRRPCFSALEVDETYVPKEFNAETFTFHADICTLSEKERQIKKQTALVELVKHKPKATKEQLKAVMDDFAAFVEKCCKADDKETCFAEEGKKLVAASQAALGL

SEQ ID NO: 797 - protein, 585 aa, Artificial Sequence
  Synthetic peptide
DAHKSEVAHRFKDLGEENFKALVLIAFAQYLQQSPFEDHVKLVNEVTEFAKTCVADESAENCDKSLHTLFGDKLCTVATLRETYGEMADCCAKQEPERNECFLQHKDDNPNLPRLVRPEVDVMCTAFHDNEETFLKKYLYEIARRHPYFYAPELLFFAKRYKAAFTECCQAADKAACLLPKLDELRDEGKASSAKQRLKCASLQKFGERAFKAWAVARLSQRFPKAEFAEVSKLVTDLTKVHTECCHGDLLECADDRADLAKYICENQDSISSKLKECCEKPLLEKSHCIAEVENDEMPADLPSLAADFVESKDVCKNYAEAKDVFLGMFLYEYARRHPDYSVVLLLRLAKTYETTLEKCCAAADPHECYAKVFDEFKPLVEEPQNLIKQNCELFEQLGEYKFQNALLVRYTKKVPQVSTPTLVEVSRNLGKVGSKCCKHPEAKRMPCAEDYLSVVLNQLCVLHEKTPVSDRVTKCCTESLVNRRPCFSALEVDETYVPKEFNAGTFTFHADICTLSEKERQIKKQTALVELVKHKPKATKEQLKAAMDDFAAFVEKCCKADDKETCFAEEGKKLVAASQAALGL

SEQ ID NO: 798 - protein, 585 aa, Artificial Sequence
  Synthetic peptide
DAHKSEVAHRFKDLGEENFKALVLIAFAQYLQQSPFEDHVKLVNEVTEFAKTCVADESAENCDKSLHTLFGDKLCTVATLRETYGEMADCCAKQEPERNECFLQHKDDNPNLPRLVRPEVDVMCTAFHDNEETFLKKYLYEIARRHPYFYAPELLFFAKRYKAAFTECCQAADKAACLLPKLDELRDEGKASSAKQRLKCASLQKFGERAFKAWAVARLSQRFPKAEFAEVSKLVTDLTKVHTECCHGDLLECADDRADLAKYICENQDSISSKLKECCEKPLLEKSHCIAEVENDEMPADLPSLAADFVESKDVCKNYAEAKDVFLGMFLYEYARRHPDYSVVLLLRLAKTYETTLEKCCAAADPHECYAKVFDEFKPLVEEPQNLIKQNCELFEQLGEYKFQNALLVRYTKKVPQVSTPTLVEVSRNLGKVGSKCCKHPEAKRMPCAEDYLSVVLNQLCVLHEKTPVSDRVTKCCTESLVNRRPCFSALEVDETYVPKEFNAETFTFHADICTLSEKERQIKKQTALVELVKHKPKATKEQLKAVMDDFAAFVEKCCKADDKETCFAEEGPKLVAASQAALGL

SEQ ID NO: 799 - protein, 585 aa, Artificial Sequence
  Synthetic peptide
DAHKSEVAHRFKDLGEENFKALVLIAFAQYLQQSPFEDHVKLVNEVTEFAKTCVADESAENCDKSLHTLFGDKLCTVATLRETYGEMADCCAKQEPERNECFLQHKDDNPNLPRLVRPEVDVMCTAFHDNEETFLKKYLYEIARRHPYFYAPELLFFAKRYKAAFTECCQAADKAACLLPKLDELRDEGKASSAKQRLKCASLQKFGERAFKAWAVARLSQRFPKAEFAEVSKLVTDLTKVHTECCHGDLLECADDRADLAKYICENQDSISSKLKECCEKPLLEKSHCIAEVENDEMPADLPSLAADFVESKDVCKNYAEAKDVFLGMFLYEYARRHPDYSVVLLLRLAKTYETTLEKCCAAADPHECYAKVFDEFKPLVEEPQNLIKQNCELFEQLGEYKFQNALLVRYTKKVPQVSTPTLVEVSRNLGKVGSKCCKHPEAKRMPCAEDYLSVVLNQLCVLHEKTPVSDRVTKCCTESLVNRRPCFSALDVDETYVPKEFNAETFTFHADICTLSEKERQIKKQTALVELVKHKPKATKEQLKAVMDDFAAFVEKCCKADDKETCFAEEGPHLVAASKAALGL

SEQ ID NO: 800 - protein, 585 aa, Artificial Sequence
  Synthetic peptide
DAHKSEVAHRFKDLGEENFKALVLIAFAQYLQQSPFEDHVKLVNEVTEFAKTCVADESAENCDKSLHTLFGDKLCTVATLRETYGEMADCCAKQEPERNECFLQHKDDNPNLPRLVRPEVDVMCTAFHDNEETFLKKYLYEIARRHPYFYAPELLFFAKRYKAAFTECCQAADKAACLLPKLDELRDEGKASSAKQRLKCASLQKFGERAFKAWAVARLSQRFPKAEFAEVSKLVTDLTKVHTECCHGDLLECADDRADLAKYICENQDSISSKLKECCEKPLLEKSHCIAEVENDEMPADLPSLAADFVESKDVCKNYAEAKDVFLGMFLYEYARRHPDYSVVLLLRLAKTYETTLEKCCAAADPHECYAKVFDEFKPLVEEPQNLIKQNCELFEQLGEYKFQNALLVRYTKKVPQVSTPTLVEVSRNLGKVGSKCCKHPEAKRMPCAEDYLSVVLNQLCVLHEKTPVSDRVTKCCTESLVNRRPCFSALGVDETYVPKEFNAETFTFHADICTLSEKERQIKKQTALVELVKHKPKATKEQLKAVMDKFAAFVEKCCKADDKETCFAEEGPKLVAASQAALGL

SEQ ID NO: 801 - protein, 585 aa, Artificial Sequence
  Synthetic peptide
DAHKSEVAHRFKDLGEENFKALVLIAFAQYLQQSPFEDHVKLVNEVTEFAKTCVADESAENCDKSLHTLFGDKLCTVATLRETYGEMADCCAKQEPERNECFLQHKDDNPNLPRLVRPEVDVMCTAFHDNEETFLKKYLYEIARRHPYFYAPELLFFAKRYKAAFTECCQAADKAACLLPKLDELRDEGKASSAKQRLKCASLQKFGERAFKAWAVARLSQRFPKAEFAEVSKLVTDLTKVHTECCHGDLLECADDRADLAKYICENQDSISSKLKECCEKPLLEKSHCIAEVENDEMPADLPSLAADFVESKDVCKNYAEAKDVFLGMFLYEYARRHPDYSVVLLLRLAKTYETTLEKCCAAADPHECYAKVFDEFKPLVEEPQNLIKQNCELFEQLGEYKFQNALLVRYTKKVPQVSTPTLVEVSRNLGKVGSKCCKHPEAKRMPCAEDYLSVVLNQLCVLHEKTPVSDRVTKCCTESLVNRRPCFSALDVDETYVPKEFNAETFTFHADICTLSEKERQIKKQTALVELVKHKPKATKEQLKAVMDKFAAFVEKCCKADDKETCFAEEGPKLVAASQAALGL

SEQ ID NO: 802 - protein, 585 aa, Artificial Sequence
  Synthetic peptide
DAHKSEVAHRFKDLGEENFKALVLIAFAQYLQQSPFEDHVKLVNEVTEFAKTCVADESAENCDKSLHTLFGDKLCTVATLRETYGEMADCCAKQEPERNECFLQHKDDNPNLPRLVRPEVDVMCTAFHDNEETFLKKYLYEIARRHPYFYAPELLFFAKRYKAAFTECCQAADKAACLLPKLDELRDEGKASSAKQRLKCASLQKFGERAFKAWAVARLSQRFPKAEFAEVSKLVTDLTKVHTECCHGDLLECADDRADLAKYICENQDSISSKLKECCEKPLLEKSHCIAEVENDEMPADLPSLAADFVESKDVCKNYAEAKDVFLGMFLYEYARRHPDYSVVLLLRLAKTYETTLEKCCAAADPHECYAKVFDEFKPLVEEPQNLIKQNCELFEQLGEYKFQNALLVRYTKKVPQVSTPTLVEVSRNLGKVGSKCCKHPEAKRMPCAEDYLSVVLNQLCVLHEKTPVSDRVTKCCTESLVNRRPCFSALEVDETYVPKEFNAETFTFHADICTLSEKERQIKKQTALVELVKHKPKATKEQLKAVMDKFAAFVEKCCKADDKETCFAEEGPHLVAASQAALGL

SEQ ID NO: 803 - protein, 585 aa, Artificial Sequence
  Synthetic peptide
DAHKSEVAHRFKDLGEENFKALVLIAFAQYLQQSPFEDHVKLVNEVTEFAKTCVADESAENCDKSLHTLFGDKLCTVATLRETYGEMADCCAKQEPERNECFLQHKDDNPNLPRLVRPEVDVMCTAFHDNEETFLKKYLYEIARRHPYFYAPELLFFAKRYKAAFTECCQAADKAACLLPKLDELRDEGKASSAKQRLKCASLQKFGERAFKAWAVARLSQRFPKAEFAEVSKLVTDLTKVHTECCHGDLLECADDRADLAKYICENQDSISSKLKECCEKPLLEKSHCIAEVENDEMPADLPSLAADFVESKDVCKNYAEAKDVFLGMFLYEYARRHPDYSVVLLLRLAKTYETTLEKCCAAADPHECYAKVFDEFKPLVEEPQNLIKQNCELFEQLGEYKFQNALLVRYTKKVPQVSTPTLVEVSRNLGKVGSKCCKHPEAKRMPCAEDYLSVVLNQLCVLHEKTPVSDRVTKCCTESLVNRRPCFSALEVDETYVPKEFNAETFTFHADICTLSEKERQIKKQTALVELVKHKPKATKEQLKAVMDDFAAFVEKCCKADDKETCFAEEGPHLVAASKAALGL

SEQ ID NO: 804 - protein, 585 aa, Artificial Sequence
  Synthetic peptide
DAHKSEVAHRFKDLGEENFKALVLIAFAQYLQQSPFEDHVKLVNEVTEFAKTCVADESAENCDKSLHTLFGDKLCTVATLRETYGEMADCCAKQEPERNECFLQHKDDNPNLPRLVRPEVDVMCTAFHDNEETFLKKYLYEIARRHPYFYAPELLFFAKRYKAAFTECCQAADKAACLLPKLDELRDEGKASSAKQRLKCASLQKFGERAFKAWAVARLSQRFPKAEFAEVSKLVTDLTKVHTECCHGDLLECADDRADLAKYICENQDSISSKLKECCEKPLLEKSHCIAEVENDEMPADLPSLAADFVESKDVCKNYAEAKDVFLGMFLYEYARRHPDYSVVLLLRLAKTYETTLEKCCAAADPHECYAKVFDEFKPLVEEPQNLIKQNCELFEQLGEYKFQNALLVRYTKKVPQVSTPTLVEVSRNLGKVGSKCCKHPEAKRMPCAEDYLSVVLNQLCVLHEKTPVSDRVTKCCTESLVNRRPCFSALEVDETYVPKEFNAETFTFHADICTLSEKERQIKKQTALVELVKHKPKATKEQLKAVMDKFAAFVEKCCKADDKETCFAEEGPKLVAASKAALGL

SEQ ID NO: 805 - protein, 585 aa, Artificial Sequence
  Synthetic peptide
DAHKSEVAHRFKDLGEENFKALVLIAFAQYLQQSPFEDHVKLVNEVTEFAKTCVADESAENCDKSLHTLFGDKLCTVATLRETYGEMADCCAKQEPERNECFLQHKDDNPNLPRLVRPEVDVMCTAFHDNEETFLKKYLYEIARRHPYFYAPELLFFAKRYKAAFTECCQAADKAACLLPKLDELRDEGKASSAKQRLKCASLQKFGERAFKAWAVARLSQRFPKAEFAEVSKLVTDLTKVHTECCHGDLLECADDRADLAKYICENQDSISSKLKECCEKPLLEKSHCIAEVENDEMPADLPSLAADFVESKDVCKNYAEAKDVFLGMFLYEYARRHPDYSVVLLLRLAKTYETTLEKCCAAADPHECYAKVFDEFKPLVEEPQNLIKQNCELFEQLGEYKFQNALLVRYTKKVPQVSTPTLVEVSRNLGKVGSKCCKHPEAKRMPCAEDYLSVVLNQLCVLHEKTPVSDRVTKCCTESLVNRRPCFSALDVDETYVPKEFNAETFTFHADICTLSEKERQIKKQTALVELVKHKPKATKEQLKAVMDDFAAFVEKCCKADDKETCFAEEGPKLVAASKAALGL

SEQ ID NO: 806 - protein, 585 aa, Artificial Sequence
  Synthetic peptide
DAHKSEVAHRFKDLGEENFKALVLIAFAQYLQQAPFEDHVKLVNEVTEFAKTCVADESAENCDKSLHTLFGDKLCTVATLRETYGEMADCCAKQEPERNECFLQHKDDNPNLPRLVRPEVDVMCTAFHDNEETFLKKYLYEIARRHPYFYAPELLFFAKRYKAAFTECCQAADKAACLLPKLDELRDEGKASSAKQRLKCASLQKFGERAFKAWAVARLSQRFPKAEFAEVSKLVTDLTKVHTECCHGDLLECADDRADLAKYICENQDSISSKLKECCEKPLLEKSHCIAEVENDEMPADLPSLAADFVESKDVCKNYAEAKDVFLGMFLYEYARRHPDYSVVLLLRLAKTYETTLEKCCAAADPHECYAKVFDEFKPLVEEPQNLIKQNCELFEQLGEYKFQNALLVRYTKKVPQVSTPTLVEVSRNLGKVGSKCCKHPEAKRMPCAEDYLSVVLNQLCVLHEKTPVSDRVTKCCTESLVNRRPCFSALEVDETYVPKEFNAETFTFHADICTLSEKERQIKKQTALVELVKHKPKATKEQLKAVMDDFAAFVEKCCKADDKETCFAEEGKKLVAASQAALGL

SEQ ID NO: 807 - protein, 585 aa, Artificial Sequence
  Synthetic peptide
DAHKSEVAHRFKDLGEENFKALVLIAFAQYLQQAPFEDHVKLVNEVTEFAKTCVADESAENCDKSLHTLFGDKLCTVATLRETYGEMADCCAKQEPERNECFLQHKDDNPNLPRLVRPEVDVMCTAFHDNEETFLKKYLYEIARRHPYFYAPELLFFAKRYKAAFTECCQAADKAACLLPKLDELRDEGKASSAKQRLKCASLQKFGERAFKAWAVARLSQRFPKAEFAEVSKLVTDLTKVHTECCHGDLLECADDRADLAKYICENQDSISSKLKECCEKPLLEKSHCIAEVENDEMPADLPSLAADFVESKDVCKNYAEAKDVFLGMFLYEYARRHPDYSVVLLLRLAKTYETTLEKCCAAADPHECYAKVFDEFKPLVEEPQNLIKQNCELFEQLGEYKFQNALLVRYTKKVPQVSTPTLVEVSRNLGKVGSKCCKHPEAKRMPCAEDYLSVVLNQLCVLHEKTPVSDRVTKCCTESLVNRRPCFSALEVDETYVPKEFNAGTFTFHADICTLSEKERQIKKQTALVELVKHKPKATKEQLKAAMDDFAAFVEKCCKADDKETCFAEEGKKLVAASQAALGL

SEQ ID NO: 808 - protein, 585 aa, Artificial Sequence
  Synthetic peptide
DAHKSEVAHRFKDLGEENFKALVLIAFAQYLQQAPFEDHVKLVNEVTEFAKTCVADESAENCDKSLHTLFGDKLCTVATLRETYGEMADCCAKQEPERNECFLQHKDDNPNLPRLVRPEVDVMCTAFHDNEETFLKKYLYEIARRHPYFYAPELLFFAKRYKAAFTECCQAADKAACLLPKLDELRDEGKASSAKQRLKCASLQKFGERAFKAWAVARLSQRFPKAEFAEVSKLVTDLTKVHTECCHGDLLECADDRADLAKYICENQDSISSKLKECCEKPLLEKSHCIAEVENDEMPADLPSLAADFVESKDVCKNYAEAKDVFLGMFLYEYARRHPDYSVVLLLRLAKTYETTLEKCCAAADPHECYAKVFDEFKPLVEEPQNLIKQNCELFEQLGEYKFQNALLVRYTKKVPQVSTPTLVEVSRNLGKVGSKCCKHPEAKRMPCAEDYLSVVLNQLCVLHEKTPVSDRVTKCCTESLVNRRPCFSALEVDETYVPKEFNAETFTFHADICTLSEKERQIKKQTALVELVKHKPKATKEQLKAVMDDFAAFVEKCCKADDKETCFAEEGPKLVAASQAALGL

SEQ ID NO: 809 - protein, 585 aa, Artificial Sequence
  Synthetic peptide
DAHKSEVAHRFKDLGEENFKALVLIAFAQYLQQAPFEDHVKLVNEVTEFAKTCVADESAENCDKSLHTLFGDKLCTVATLRETYGEMADCCAKQEPERNECFLQHKDDNPNLPRLVRPEVDVMCTAFHDNEETFLKKYLYEIARRHPYFYAPELLFFAKRYKAAFTECCQAADKAACLLPKLDELRDEGKASSAKQRLKCASLQKFGERAFKAWAVARLSQRFPKAEFAEVSKLVTDLTKVHTECCHGDLLECADDRADLAKYICENQDSISSKLKECCEKPLLEKSHCIAEVENDEMPADLPSLAADFVESKDVCKNYAEAKDVFLGMFLYEYARRHPDYSVVLLLRLAKTYETTLEKCCAAADPHECYAKVFDEFKPLVEEPQNLIKQNCELFEQLGEYKFQNALLVRYTKKVPQVSTPTLVEVSRNLGKVGSKCCKHPEAKRMPCAEDYLSVVLNQLCVLHEKTPVSDRVTKCCTESLVNRRPCFSALDVDETYVPKEFNAETFTFHADICTLSEKERQIKKQTALVELVKHKPKATKEQLKAVMDDFAAFVEKCCKADDKETCFAEEGPHLVAASKAALGL

SEQ ID NO: 810 - protein, 585 aa, Artificial Sequence
  Synthetic peptide
DAHKSEVAHRFKDLGEENFKALVLIAFAQYLQQAPFEDHVKLVNEVTEFAKTCVADESAENCDKSLHTLFGDKLCTVATLRETYGEMADCCAKQEPERNECFLQHKDDNPNLPRLVRPEVDVMCTAFHDNEETFLKKYLYEIARRHPYFYAPELLFFAKRYKAAFTECCQAADKAACLLPKLDELRDEGKASSAKQRLKCASLQKFGERAFKAWAVARLSQRFPKAEFAEVSKLVTDLTKVHTECCHGDLLECADDRADLAKYICENQDSISSKLKECCEKPLLEKSHCIAEVENDEMPADLPSLAADFVESKDVCKNYAEAKDVFLGMFLYEYARRHPDYSVVLLLRLAKTYETTLEKCCAAADPHECYAKVFDEFKPLVEEPQNLIKQNCELFEQLGEYKFQNALLVRYTKKVPQVSTPTLVEVSRNLGKVGSKCCKHPEAKRMPCAEDYLSVVLNQLCVLHEKTPVSDRVTKCCTESLVNRRPCFSALGVDETYVPKEFNAETFTFHADICTLSEKERQIKKQTALVELVKHKPKATKEQLKAVMDKFAAFVEKCCKADDKETCFAEEGPKLVAASQAALGL

SEQ ID NO: 811 - protein, 585 aa, Artificial Sequence
  Synthetic peptide
DAHKSEVAHRFKDLGEENFKALVLIAFAQYLQQAPFEDHVKLVNEVTEFAKTCVADESAENCDKSLHTLFGDKLCTVATLRETYGEMADCCAKQEPERNECFLQHKDDNPNLPRLVRPEVDVMCTAFHDNEETFLKKYLYEIARRHPYFYAPELLFFAKRYKAAFTECCQAADKAACLLPKLDELRDEGKASSAKQRLKCASLQKFGERAFKAWAVARLSQRFPKAEFAEVSKLVTDLTKVHTECCHGDLLECADDRADLAKYICENQDSISSKLKECCEKPLLEKSHCIAEVENDEMPADLPSLAADFVESKDVCKNYAEAKDVFLGMFLYEYARRHPDYSVVLLLRLAKTYETTLEKCCAAADPHECYAKVFDEFKPLVEEPQNLIKQNCELFEQLGEYKFQNALLVRYTKKVPQVSTPTLVEVSRNLGKVGSKCCKHPEAKRMPCAEDYLSVVLNQLCVLHEKTPVSDRVTKCCTESLVNRRPCFSALDVDETYVPKEFNAETFTFHADICTLSEKERQIKKQTALVELVKHKPKATKEQLKAVMDKFAAFVEKCCKADDKETCFAEEGPKLVAASQAALGL

SEQ ID NO: 812 - protein, 585 aa, Artificial Sequence
  Synthetic peptide
DAHKSEVAHRFKDLGEENFKALVLIAFAQYLQQAPFEDHVKLVNEVTEFAKTCVADESAENCDKSLHTLFGDKLCTVATLRETYGEMADCCAKQEPERNECFLQHKDDNPNLPRLVRPEVDVMCTAFHDNEETFLKKYLYEIARRHPYFYAPELLFFAKRYKAAFTECCQAADKAACLLPKLDELRDEGKASSAKQRLKCASLQKFGERAFKAWAVARLSQRFPKAEFAEVSKLVTDLTKVHTECCHGDLLECADDRADLAKYICENQDSISSKLKECCEKPLLEKSHCIAEVENDEMPADLPSLAADFVESKDVCKNYAEAKDVFLGMFLYEYARRHPDYSVVLLLRLAKTYETTLEKCCAAADPHECYAKVFDEFKPLVEEPQNLIKQNCELFEQLGEYKFQNALLVRYTKKVPQVSTPTLVEVSRNLGKVGSKCCKHPEAKRMPCAEDYLSVVLNQLCVLHEKTPVSDRVTKCCTESLVNRRPCFSALEVDETYVPKEFNAETFTFHADICTLSEKERQIKKQTALVELVKHKPKATKEQLKAVMDKFAAFVEKCCKADDKETCFAEEGPHLVAASQAALGL

SEQ ID NO: 813 - protein, 585 aa, Artificial Sequence
  Synthetic peptide
DAHKSEVAHRFKDLGEENFKALVLIAFAQYLQQAPFEDHVKLVNEVTEFAKTCVADESAENCDKSLHTLFGDKLCTVATLRETYGEMADCCAKQEPERNECFLQHKDDNPNLPRLVRPEVDVMCTAFHDNEETFLKKYLYEIARRHPYFYAPELLFFAKRYKAAFTECCQAADKAACLLPKLDELRDEGKASSAKQRLKCASLQKFGERAFKAWAVARLSQRFPKAEFAEVSKLVTDLTKVHTECCHGDLLECADDRADLAKYICENQDSISSKLKECCEKPLLEKSHCIAEVENDEMPADLPSLAADFVESKDVCKNYAEAKDVFLGMFLYEYARRHPDYSVVLLLRLAKTYETTLEKCCAAADPHECYAKVFDEFKPLVEEPQNLIKQNCELFEQLGEYKFQNALLVRYTKKVPQVSTPTLVEVSRNLGKVGSKCCKHPEAKRMPCAEDYLSVVLNQLCVLHEKTPVSDRVTKCCTESLVNRRPCFSALEVDETYVPKEFNAETFTFHADICTLSEKERQIKKQTALVELVKHKPKATKEQLKAVMDDFAAFVEKCCKADDKETCFAEEGPHLVAASKAALGL

SEQ ID NO: 814 - protein, 585 aa, Artificial Sequence
  Synthetic peptide
DAHKSEVAHRFKDLGEENFKALVLIAFAQYLQQAPFEDHVKLVNEVTEFAKTCVADESAENCDKSLHTLFGDKLCTVATLRETYGEMADCCAKQEPERNECFLQHKDDNPNLPRLVRPEVDVMCTAFHDNEETFLKKYLYEIARRHPYFYAPELLFFAKRYKAAFTECCQAADKAACLLPKLDELRDEGKASSAKQRLKCASLQKFGERAFKAWAVARLSQRFPKAEFAEVSKLVTDLTKVHTECCHGDLLECADDRADLAKYICENQDSISSKLKECCEKPLLEKSHCIAEVENDEMPADLPSLAADFVESKDVCKNYAEAKDVFLGMFLYEYARRHPDYSVVLLLRLAKTYETTLEKCCAAADPHECYAKVFDEFKPLVEEPQNLIKQNCELFEQLGEYKFQNALLVRYTKKVPQVSTPTLVEVSRNLGKVGSKCCKHPEAKRMPCAEDYLSVVLNQLCVLHEKTPVSDRVTKCCTESLVNRRPCFSALEVDETYVPKEFNAETFTFHADICTLSEKERQIKKQTALVELVKHKPKATKEQLKAVMDKFAAFVEKCCKADDKETCFAEEGPKLVAASKAALGL

SEQ ID NO: 815 - protein, 585 aa, Artificial Sequence
  Synthetic peptide
DAHKSEVAHRFKDLGEENFKALVLIAFAQYLQQAPFEDHVKLVNEVTEFAKTCVADESAENCDKSLHTLFGDKLCTVATLRETYGEMADCCAKQEPERNECFLQHKDDNPNLPRLVRPEVDVMCTAFHDNEETFLKKYLYEIARRHPYFYAPELLFFAKRYKAAFTECCQAADKAACLLPKLDELRDEGKASSAKQRLKCASLQKFGERAFKAWAVARLSQRFPKAEFAEVSKLVTDLTKVHTECCHGDLLECADDRADLAKYICENQDSISSKLKECCEKPLLEKSHCIAEVENDEMPADLPSLAADFVESKDVCKNYAEAKDVFLGMFLYEYARRHPDYSVVLLLRLAKTYETTLEKCCAAADPHECYAKVFDEFKPLVEEPQNLIKQNCELFEQLGEYKFQNALLVRYTKKVPQVSTPTLVEVSRNLGKVGSKCCKHPEAKRMPCAEDYLSVVLNQLCVLHEKTPVSDRVTKCCTESLVNRRPCFSALDVDETYVPKEFNAETFTFHADICTLSEKERQIKKQTALVELVKHKPKATKEQLKAVMDDFAAFVEKCCKADDKETCFAEEGPKLVAASKAALGL

SEQ ID NO: 816 - protein, 330 aa, Artificial Sequence
  Synthetic peptide
ASTKGPSVFPLAPSSKSTSGGTAALGCLVKDYFPEPVTVSWNSGALTSGVHTFPAVLQSSGLYSLSSVVTVPSSSLGTQTYICNVNHKPSNTKVDKKVEPKSCDKTHTCPPCPAPELLGGPSVFLFPPKPKDTLMISRTPEVTCVVVDVSHEDPEVKFNWYVDGVEVHNAKTKPCEEQYGSTYRCVSVLTVLHQDWLNGKEYKCKVSNKALPAPIEKTISKAKGQPREPQVYTLPPSREEMTKNQVSLTCLVKGFYPSDIAVEWESNGQPENNYDTTPPVLDSDGSFFLYSDLTVDKSRWQQGNVFSCSVMHEALHNHYTQKSLSLSPGK

SEQ ID NO: 817 - protein, 333 aa, Artificial Sequence
  Synthetic peptide
GQPKAAPSVTLFPPSSEELQANKATLVCLISDFYPGAVTVAWKADSSPVKAGVETTTPSKQSNNKYAASSYLSLTPEQWKSHRSYSCQVTHEGSTVEKTVAPTECSDKTHTCPPCPAPELLGGPSVFLFPPKPKDTLMISRTPEVTCVVVDVSHEDPEVKFNWYVDGVEVHNAKTKPCEEQYGSTYRCVSVLTVLHQDWLNGKEYKCKVSNKALPAPIEKTISKAKGQPREPQVYTLPPSRKEMTKNQVSLTCLVKGFYPSDIAVEWESNGQPENNYKTTPPVLKSDGSFFLYSKLTVDKSRWQQGNVFSCSVMHEALHNHYTQKSLSLSPGK

SEQ ID NO: 818 - protein, 330 aa, Artificial Sequence
  Synthetic peptide
ASTKGPSVFPLAPCSRSTSESTAALGCLVKDYFPEPVTVSWNSGALTSGVHTFPAVLQSSGLYSLSSVVTVPSSNFGTQTYTCNVDHKPSNTKVDKTVEPKSSDKTHTCPPCPAPEAAGGPSVFLFPPKPKDTLMISRTPEVTCVVVDVSHEDPEVKFNWYVDGVEVHNAKTKPREEQYNSTYRVVSVLTVLHQDWLNGKEYKCKVSNKALPAPIEKTISKAKGQPREPQVYTLPPSREEMTKNQVSLTCLVKGFYPSDIAVEWESNGQPENNYDTTPPVLDSDGSFFLYSDLTVDKSRWQQGNVFSCSVMHEALHNHYTQKSLSLSPGK

SEQ ID NO: 819 - protein, 338 aa, Artificial Sequence
  Synthetic peptide
GQPKAAPSVTLFPPSSEELQANKATLVCLISDFYPGAVTVAWKADSSPVKAGVETTTPSKQSNNKYAASSYLSLTPEQWKSHRSYSCQVTHEGSTVEKTVAPTECSEPKSSDKTHTCPPCPAPEAAGGPSVFLFPPKPKDTLMISRTPEVTCVVVDVSHEDPEVKFNWYVDGVEVHNAKTKPREEQYNSTYRVVSVLTVLHQDWLNGKEYKCKVSNKALPAPIEKTISKAKGQPREPQVYTLPPSRKEMTKNQVSLTCLVKGFYPSDIAVEWESNGQPENNYKTTPPVLKSDGSFFLYSKLTVDKSRWQQGNVFSCSVMHEALHNHYTQKSLSLSPGK

SEQ ID NO: 820 - protein, 227 aa, Artificial Sequence
  Synthetic peptide
DKTHTCPPCPAPELLGGPSVFLFPPKPKDTLMISRTPEVTCVVVDVSHEDPEVKFNWYVDGVEVHNAKTKPCEEQYGSTYRCVSVLTVLHQDWLNGKEYKCKVSNKALPAPIEKTISKAKGQPREPQVYTLPPSRKEMTKNQVSLTCLVKGFYPSDIAVEWESNGQPENNYKTTPPVLKSDGSFFLYSKLTVDKSRWQQGNVFSCSVMHEALHNHYTQKSLSLSPGK

SEQ ID NO: 821 - protein, 227 aa, Artificial Sequence
  Synthetic peptide
DKTHTCPPCPAPELLGGPSVFLFPPKPKDTLMISRTPEVTCVVVDVSHEDPEVKFNWYVDGVEVHNAKTKPCEEQYGSTYRCVSVLTVLHQDWLNGKEYKCKVSNKALPAPIEKTISKAKGQPREPQVYTLPPSREEMTKNQVSLTCLVKGFYPSDIAVEWESNGQPENNYDTTPPVLDSDGSFFLYSDLTVDKSRWQQGNVFSCSVMHEALHNHYTQKSLSLSPGK

SEQ ID NO: 822 - protein, 232 aa, Artificial Sequence
  Synthetic peptide
EPKSSDKTHTCPPCPAPELLGGPSVFLFPPKPKDTLMISRTPEVTCVVVDVSHEDPEVKFNWYVDGVEVHNAKTKPCEEQYGSTYRCVSVLTVLHQDWLNGKEYKCKVSNKALPAPIEKTISKAKGQPREPQVYTLPPSRKEMTKNQVSLTCLVKGFYPSDIAVEWESNGQPENNYKTTPPVLKSDGSFFLYSKLTVDKSRWQQGNVFSCSVMHEALHNHYTQKSLSLSPGK

SEQ ID NO: 823 - protein, 232 aa, Artificial Sequence
  Synthetic peptide
EPKSSDKTHTCPPCPAPELLGGPSVFLFPPKPKDTLMISRTPEVTCVVVDVSHEDPEVKFNWYVDGVEVHNAKTKPCEEQYGSTYRCVSVLTVLHQDWLNGKEYKCKVSNKALPAPIEKTISKAKGQPREPQVYTLPPSREEMTKNQVSLTCLVKGFYPSDIAVEWESNGQPENNYDTTPPVLDSDGSFFLYSDLTVDKSRWQQGNVFSCSVMHEALHNHYTQKSLSLSPGK

SEQ ID NO: 824 - protein, 232 aa, Artificial Sequence
  Synthetic peptide
EPKSSDKTHTCPPCPAPEAAGGPSVFLFPPKPKDTLMISRTPEVTCVVVDVSHEDPEVKFNWYVDGVEVHNAKTKPREEQYNSTYRVVSVLTVLHQDWLNGKEYKCKVSNKALPAPIEKTISKAKGQPREPQVYTLPPSRKEMTKNQVSLTCLVKGFYPSDIAVEWESNGQPENNYKTTPPVLKSDGSFFLYSKLTVDKSRWQQGNVFSCSVMHEALHNHYTQKSLSLSPGK

SEQ ID NO: 825 - protein, 232 aa, Artificial Sequence
  Synthetic peptide
EPKSSDKTHTCPPCPAPEAAGGPSVFLFPPKPKDTLMISRTPEVTCVVVDVSHEDPEVKFNWYVDGVEVHNAKTKPREEQYNSTYRVVSVLTVLHQDWLNGKEYKCKVSNKALPAPIEKTISKAKGQPREPQVYTLPPSREEMTKNQVSLTCLVKGFYPSDIAVEWESNGQPENNYDTTPPVLDSDGSFFLYSDLTVDKSRWQQGNVFSCSVMHEALHNHYTQKSLSLSPGK

SEQ ID NO: 826 - protein, 217 aa, Artificial Sequence
  Synthetic peptide
APELLGGPSVFLFPPKPKDTLMISRTPEVTCVVVDVSHEDPEVKFNWYVDGVEVHNAKTKPREEQYNSTYRVVSVLTVLHQDWLNGKEYKCKVSNKALPAPIEKTISKAKGQPREPQVTTLPPSREEMTKNQVSLTCLVKGFYPSDIAVEWESNGQPENNYDTTPPVLDSDGSFFLYSDLTVDKSRWQQGNVFSCSVMHEALHNHYTQKSLSLSPGK

SEQ ID NO: 827 - protein, 14 aa, Artificial Sequence
  Synthetic peptide
GSSTGAVTSGYYPN

SEQ ID NO: 828 - protein, 7 aa, Artificial Sequence
  Synthetic peptide
GTKFLAP

SEQ ID NO: 829 - protein, 9 aa, Artificial Sequence
  Synthetic peptide
ALWYSNRWV

SEQ ID NO: 830 - protein, 5 aa, Artificial Sequence
  Synthetic peptide
IYAMN

SEQ ID NO: 831 - protein, 19 aa, Artificial Sequence
  Synthetic peptide
RIRSKYNNYATYYADSVKS

SEQ ID NO: 832 - protein, 14 aa, Artificial Sequence
  Synthetic peptide
HGNFGNSYVSFFAY

SEQ ID NO: 833 - protein, 125 aa, Artificial Sequence
  Synthetic peptide
EVQLVESGGGLVQPGGSLKLSCAASGFTFNIYAMNWVRQAPGKGLEWVARIRSKYNNYATYYADSVKSRFTISRDDSKNTAYLQMNNLKTEDTAVYYCVRHGNFGNSYVSFFAYWGQGTLVTVSS

SEQ ID NO: 834 - protein, 109 aa, Artificial Sequence
  Synthetic peptide
QTVVTQEPSLTVSPGGTVTLTCGSSTGAVTSGYYPNWVQQKPGQAPRGLIGGTKFLAPGTPARFSGSLLGGKAALTLSGVQPEDEAEYYCALWYSNRWVFGGGTKLTVL

SEQ ID NO: 835 - protein, 249 aa, Artificial Sequence
  Synthetic peptide
EVQLVESGGGLVQPGGSLKLSCAASGFTFNIYAMNWVRQAPGKGLEWVARIRSKYNNYATYYADSVKSRFTISRDDSKNTAYLQMNNLKTEDTAVYYCVRHGNFGNSYVSFFAYWGQGTLVTVSSGGGGSGGGGSGGGGSQTVVTQEPSLTVSPGGTVTLTCGSSTGAVTSGYYPNWVQQKPGQAPRGLIGGTKFLAPGTPARFSGSLLGGKAALTLSGVQPEDEAEYYCALWYSNRWVFGGGTKLTVL

SEQ ID NO: 836 - protein, 14 aa, Artificial Sequence
  Synthetic peptide
GSSTGAVTSGYYPN

SEQ ID NO: 837 - protein, 7 aa, Artificial Sequence
  Synthetic peptide
GTKFLAP

SEQ ID NO: 838 - protein, 9 aa, Artificial Sequence
  Synthetic peptide
ALWYSNRWV

SEQ ID NO: 839 - protein, 5 aa, Artificial Sequence
  Synthetic peptide
KYAMN

SEQ ID NO: 840 - protein, 19 aa, Artificial Sequence
  Synthetic peptide
RIRSKYNNYATYYADSVKD

SEQ ID NO: 841 - protein, 14 aa, Artificial Sequence
  Synthetic peptide
HGNFGNSYISYWAY

SEQ ID NO: 842 - protein, 125 aa, Artificial Sequence
  Synthetic peptide
EVQLVESGGGLVQPGGSLKLSCAASGFTFNKYAMNWVRQAPGKGLEWVARIRSKYNNYATYYADSVKDRFTISRDDSKNTAYLQMNNLKTEDTAVYYCVRHGNFGNSYISYWAYWGQGTLVTVSS

SEQ ID NO: 843 - protein, 109 aa, Artificial Sequence; identical to SEQ ID NO: 834
  Synthetic peptide

SEQ ID NO: 844 - protein, 249 aa, Artificial Sequence
  Synthetic peptide
EVQLVESGGGLVQPGGSLKLSCAASGFTFNKYAMNWVRQAPGKGLEWVARIRSKYNNYATYYADSVKDRFTISRDDSKNTAYLQMNNLKTEDTAVYYCVRHGNFGNSYISYWAYWGQGTLVTVSSGGGGSGGGGSGGGGSQTVVTQEPSLTVSPGGTVTLTCGSSTGAVTSGYYPNWVQQKPGQAPRGLIGGTKFLAPGTPARFSGSLLGGKAALTLSGVQPEDEAEYYCALWYSNRWVFGGGTKLTVL

SEQ ID NO: 845 - protein, 14 aa, Artificial Sequence
  Synthetic peptide
GSSTGAVTSGYYPN

SEQ ID NO: 846 - protein, 7 aa, Artificial Sequence
  Synthetic peptide
GTKFLAP

SEQ ID NO: 847 - protein, 9 aa, Artificial Sequence
  Synthetic peptide
ALWYSNRWV

SEQ ID NO: 848 - protein, 5 aa, Artificial Sequence
  Synthetic peptide
SYAMN

SEQ ID NO: 849 - protein, 19 aa, Artificial Sequence
  Synthetic peptide
RIRSKYNNYATYYADSVKG

SEQ ID NO: 850 - protein, 14 aa, Artificial Sequence
  Synthetic peptide
HGNFGNSYLSFWAY

SEQ ID NO: 851 - protein, 125 aa, Artificial Sequence
  Synthetic peptide
EVQLVESGGGLEQPGGSLKLSCAASGFTFNSYAMNWVRQAPGKGLEWVARIRSKYNNYATYYADSVKGRFTISRDDSKNTAYLQMNNLKTEDTAVYYCVRHGNFGNSYLSFWAYWGQGTLVTVSS

SEQ ID NO: 852 - protein, 109 aa, Artificial Sequence; identical to SEQ ID NO: 834
  Synthetic peptide

SEQ ID NO: 853 - protein, 249 aa, Artificial Sequence
  Synthetic peptide
EVQLVESGGGLEQPGGSLKLSCAASGFTFNSYAMNWVRQAPGKGLEWVARIRSKYNNYATYYADSVKGRFTISRDDSKNTAYLQMNNLKTEDTAVYYCVRHGNFGNSYLSFWAYWGQGTLVTVSSGGGGSGGGGSGGGGSQTVVTQEPSLTVSPGGTVTLTCGSSTGAVTSGYYPNWVQQKPGQAPRGLIGGTKFLAPGTPARFSGSLLGGKAALTLSGVQPEDEAEYYCALWYSNRWVFGGGTKLTVL

SEQ ID NO: 854 - protein, 14 aa, Artificial Sequence
  Synthetic peptide
GSSTGAVTSGYYPN

SEQ ID NO: 855 - protein, 7 aa, Artificial Sequence
  Synthetic peptide
GTKFLAP

SEQ ID NO: 856 - protein, 9 aa, Artificial Sequence
  Synthetic peptide
ALWYSNRWV

SEQ ID NO: 857 - protein, 5 aa, Artificial Sequence
  Synthetic peptide
RYAMN

SEQ ID NO: 858 - protein, 19 aa, Artificial Sequence
  Synthetic peptide
RIRSKYNNYATYYADSVKG

SEQ ID NO: 859 - protein, 14 aa, Artificial Sequence
  Synthetic peptide
HGNFGNSYLSYFAY

SEQ ID NO: 860 - protein, 125 aa, Artificial Sequence
  Synthetic peptide
EVQLVESGGGLVQPGGSLKLSCAASGFTFNRYAMNWVRQAPGKGLEWVARIRSKYNNYATYYADSVKGRFTISRDDSKNTAYLQMNNLKTEDTAVYYCVRHGNFGNSYLSYFAYWGQGTLVTVSS

SEQ ID NO: 861 - protein, 109 aa, Artificial Sequence; identical to SEQ ID NO: 834
  Synthetic peptide

SEQ ID NO: 862 - protein, 249 aa, Artificial Sequence
  Synthetic peptide
EVQLVESGGGLVQPGGSLKLSCAASGFTFNRYAMNWVRQAPGKGLEWVARIRSKYNNYATYYADSVKGRFTISRDDSKNTAYLQMNNLKTEDTAVYYCVRHGNFGNSYLSYFAYWGQGTLVTVSSGGGGSGGGGSGGGGSQTVVTQEPSLTVSPGGTVTLTCGSSTGAVTSGYYPNWVQQKPGQAPRGLIGGTKFLAPGTPARFSGSLLGGKAALTLSGVQPEDEAEYYCALWYSNRWVFGGGTKLTVL

SEQ ID NO: 863 - protein, 14 aa, Artificial Sequence
  Synthetic peptide
RSSTGAVTSGYYPN

SEQ ID NO: 864 - protein, 7 aa, Artificial Sequence
  Synthetic peptide
ATDMRPS

SEQ ID NO: 865 - protein, 9 aa, Artificial Sequence
  Synthetic peptide
ALWYSNRWV

SEQ ID NO: 866 - protein, 5 aa, Artificial Sequence
  Synthetic peptide
VYAMN

SEQ ID NO: 867 - protein, 19 aa, Artificial Sequence
  Synthetic peptide
RIRSKYNNYATYYADSVKK

SEQ ID NO: 868 - protein, 14 aa, Artificial Sequence
  Synthetic peptide
HGNFGNSYLSWWAY

SEQ ID NO: 869 - protein, 125 aa, Artificial Sequence
  Synthetic peptide
EVQLVESGGGLVQPGGSLKLSCAASGFTFNVYAMNWVRQAPGKGLEWVARIRSKYNNYATYYADSVKKRFTISRDDSKNTAYLQMNNLKTEDTAVYYCVRHGNFGNSYLSWWAYWGQGTLVTVSS

SEQ ID NO: 870 - protein, 109 aa, Artificial Sequence
  Synthetic peptide
QTVVTQEPSLTVSPGGTVTLTCRSSTGAVTSGYYPNWVQQKPGQAPRGLIGATDMRPSGTPARFSGSLLGGKAALTLSGVQPEDEAEYYCALWYSNRWVFGGGTKLTVL

SEQ ID NO: 871 - protein, 249 aa, Artificial Sequence
  Synthetic peptide
EVQLVESGGGLVQPGGSLKLSCAASGFTFNVYAMNWVRQAPGKGLEWVARIRSKYNNYATYYADSVKKRFTISRDDSKNTAYLQMNNLKTEDTAVYYCVRHGNFGNSYLSWWAYWGQGTLVTVSSGGGGSGGGGSGGGGSQTVVTQEPSLTVSPGGTVTLTCRSSTGAVTSGYYPNWVQQKPGQAPRGLIGATDMRPSGTPARFSGSLLGGKAALTLSGVQPEDEAEYYCALWYSNRWVFGGGTKLTVL

SEQ ID NO: 872 - protein, 14 aa, Artificial Sequence
  Synthetic peptide
GSSTGAVTSGYYPN

SEQ ID NO: 873 - protein, 7 aa, Artificial Sequence
  Synthetic peptide
GTKFLAP

SEQ ID NO: 874 - protein, 9 aa, Artificial Sequence
  Synthetic peptide
ALWYSNRWV

SEQ ID NO: 875 - protein, 5 aa, Artificial Sequence
  Synthetic peptide
KYAMN

SEQ ID NO: 876 - protein, 19 aa, Artificial Sequence
  Synthetic peptide
RIRSKYNNYATYYADSVKS

SEQ ID NO: 877 - protein, 14 aa, Artificial Sequence
  Synthetic peptide
HGNFGNSYTSYYAY

SEQ ID NO: 878 - protein, 125 aa, Artificial Sequence
  Synthetic peptide
EVQLVESGGGLVQPGGSLKLSCAASGFTFNKYAMNWVRQAPGKGLEWVARIRSKYNNYATYYADSVKSRFTISRDDSKNTAYLQMNNLKTEDTAVYYCVRHGNFGNSYTSYYAYWGQGTLVTVSS

SEQ ID NO: 879 - protein, 109 aa, Artificial Sequence; identical to SEQ ID NO: 834
  Synthetic peptide

SEQ ID NO: 880 - protein, 249 aa, Artificial Sequence
  Synthetic peptide
EVQLVESGGGLVQPGGSLKLSCAASGFTFNKYAMNWVRQAPGKGLEWVARIRSKYNNYATYYADSVKSRFTISRDDSKNTAYLQMNNLKTEDTAVYYCVRHGNFGNSYTSYYAYWGQGTLVTVSSGGGGSGGGGSGGGGSQTVVTQEPSLTVSPGGTVTLTCGSSTGAVTSGYYPNWVQQKPGQAPRGLIGGTKFLAPGTPARFSGSLLGGKAALTLSGVQPEDEAEYYCALWYSNRWVFGGGTKLTVL

SEQ ID NO: 881 - protein, 14 aa, Artificial Sequence
  Synthetic peptide
RSSTGAVTSGYYPN

SEQ ID NO: 882 - protein, 7 aa, Artificial Sequence
  Synthetic peptide
ATDMRPS

SEQ ID NO: 883 - protein, 9 aa, Artificial Sequence
  Synthetic peptide
ALWYSNRWV

SEQ ID NO: 884 - protein, 5 aa, Artificial Sequence
  Synthetic peptide
GYAMN

SEQ ID NO: 885 - protein, 19 aa, Artificial Sequence
  Synthetic peptide
RIRSKYNNYATYYADSVKE

SEQ ID NO: 886 - protein, 14 aa, Artificial Sequence
  Synthetic peptide
HRNFGNSYLSWFAY

SEQ ID NO: 887 - protein, 125 aa, Artificial Sequence
  Synthetic peptide
EVQLVESGGGLVQPGGSLKLSCAASGFTFNGYAMNWVRQAPGKGLEWVARIRSKYNNYATYYADSVKERFTISRDDSKNTAYLQMNNLKTEDTAVYYCVRHRNFGNSYLSWFAYWGQGTLVTVSS

SEQ ID NO: 888 - protein, 109 aa, Artificial Sequence; identical to SEQ ID NO: 870
  Synthetic peptide

SEQ ID NO: 889 - protein, 249 aa, Artificial Sequence
  Synthetic peptide
EVQLVESGGGLVQPGGSLKLSCAASGFTFNGYAMNWVRQAPGKGLEWVARIRSKYNNYATYYADSVKERFTISRDDSKNTAYLQMNNLKTEDTAVYYCVRHRNFGNSYLSWFAYWGQGTLVTVSSGGGGSGGGGSGGGGSQTVVTQEPSLTVSPGGTVTLTCRSSTGAVTSGYYPNWVQQKPGQAPRGLIGATDMRPSGTPARFSGSLLGGKAALTLSGVQPEDEAEYYCALWYSNRWVFGGGTKLTVL

SEQ ID NO: 890 - protein, 14 aa, Artificial Sequence
  Synthetic peptide
GSSTGAVTSGYYPN

SEQ ID NO: 891 - protein, 7 aa, Artificial Sequence
  Synthetic peptide
GTKFLAP

SEQ ID NO: 892 - protein, 9 aa, Artificial Sequence
  Synthetic peptide
ALWYSNRWV

SEQ ID NO: 893 - protein, 5 aa, Artificial Sequence
  Synthetic peptide
VYAMN

SEQ ID NO: 894 - protein, 19 aa, Artificial Sequence
  Synthetic peptide
RIRSKYNNYATYYADSVKK

SEQ ID NO: 895 - protein, 14 aa, Artificial Sequence
  Synthetic peptide
HGNFGNSYISWWAY

SEQ ID NO: 896 - protein, 125 aa, Artificial Sequence
  Synthetic peptide
EVQLVESGGGLVQPGGSLKLSCAASGFTFNVYAMNWVRQAPGKGLEWVARIRSKYNNYATYYADSVKKRFTISRDDSKNTAYLQMNNLKTEDTAVYYCVRHGNFGNSYISWWAYWGQGTLVTVSS

SEQ ID NO: 897 - protein, 109 aa, Artificial Sequence; identical to SEQ ID NO: 834
  Synthetic peptide

SEQ ID NO: 898 - protein, 249 aa, Artificial Sequence
  Synthetic peptide
EVQLVESGGGLVQPGGSLKLSCAASGFTFNVYAMNWVRQAPGKGLEWVARIRSKYNNYATYYADSVKKRFTISRDDSKNTAYLQMNNLKTEDTAVYYCVRHGNFGNSYISWWAYWGQGTLVTVSSGGGGSGGGGSGGGGSQTVVTQEPSLTVSPGGTVTLTCGSSTGAVTSGYYPNWVQQKPGQAPRGLIGGTKFLAPGTPARFSGSLLGGKAALTLSGVQPEDEAEYYCALWYSNRWVFGGGTKLTVL

SEQ ID NO: 899 - protein, 14 aa, Artificial Sequence
  Synthetic peptide
GSSTGAVTSGNYPN

SEQ ID NO: 900 - protein, 7 aa, Artificial Sequence
  Synthetic peptide
GTKFLAP

SEQ ID NO: 901 - protein, 9 aa, Artificial Sequence
  Synthetic peptide
VLWYSNRWV

SEQ ID NO: 902 - protein, 5 aa, Artificial Sequence
  Synthetic peptide
SYAMN

SEQ ID NO: 903 - protein, 19 aa, Artificial Sequence
  Synthetic peptide
RIRSKYNNYATYYADSVKG

SEQ ID NO: 904 - protein, 14 aa, Artificial Sequence
  Synthetic peptide
HGNFGNSYVSWWAY

SEQ ID NO: 905 - protein, 125 aa, Artificial Sequence
  Synthetic peptide
EVQLVESGGGLVQPGGSLKLSCAASGFTFNSYAMNWVRQAPGKGLEWVARIRSKYNNYATYYADSVKGRFTISRDDSKNTAYLQMNNLKTEDTAVYYCVRHGNFGNSYVSWWAYWGQGTLVTVSS

SEQ ID NO: 906 - protein, 109 aa, Artificial Sequence
  Synthetic peptide
QTVVTQEPSLTVSPGGTVTLTCGSSTGAVTSGNYPNWVQQKPGQAPRGLIGGTKFLAPGTPARFSGSLLGGKAALTLSGVQPEDEAEYYCVLWYSNRWVFGGGTKLTVL

SEQ ID NO: 907 - protein, 249 aa, Artificial Sequence
  Synthetic peptide
EVQLVESGGGLVQPGGSLKLSCAASGFTFNSYAMNWVRQAPGKGLEWVARIRSKYNNYATYYADSVKGRFTISRDDSKNTAYLQMNNLKTEDTAVYYCVRHGNFGNSYVSWWAYWGQGTLVTVSSGGGGSGGGGSGGGGSQTVVTQEPSLTVSPGGTVTLTCGSSTGAVTSGNYPNWVQQKPGQAPRGLIGGTKFLAPGTPARFSGSLLGGKAALTLSGVQPEDEAEYYCVLWYSNRWVFGGGTKLTVL

SEQ ID NO: 908 - protein, 14 aa, Artificial Sequence
  Synthetic peptide
GSSTGAVTSGNYPN

SEQ ID NO: 909 - protein, 7 aa, Artificial Sequence
  Synthetic peptide
GTKFLAP

SEQ ID NO: 910 - protein, 9 aa, Artificial Sequence
  Synthetic peptide
VLWYSNRWV

SEQ ID NO: 911 - protein, 5 aa, Artificial Sequence
  Synthetic peptide
KYAMN

SEQ ID NO: 912 - protein, 19 aa, Artificial Sequence
  Synthetic peptide
RIRSKYNNYATYYADSVKD

SEQ ID NO: 913 - protein, 14 aa, Artificial Sequence
  Synthetic peptide
HGNFGNSYISYWAY

SEQ ID NO: 914 - protein, 125 aa, Artificial Sequence; identical to SEQ ID NO: 842
  Synthetic peptide

SEQ ID NO: 915 - protein, 109 aa, Artificial Sequence; identical to SEQ ID NO: 906
  Synthetic peptide

SEQ ID NO: 916 - protein, 249 aa, Artificial Sequence
  Synthetic peptide
EVQLVESGGGLVQPGGSLKLSCAASGFTFNKYAMNWVRQAPGKGLEWVARIRSKYNNYATYYADSVKDRFTISRDDSKNTAYLQMNNLKTEDTAVYYCVRHGNFGNSYISYWAYWGQGTLVTVSSGGGGSGGGGSGGGGSQTVVTQEPSLTVSPGGTVTLTCGSSTGAVTSGNYPNWVQQKPGQAPRGLIGGTKFLAPGTPARFSGSLLGGKAALTLSGVQPEDEAEYYCVLWYSNRWVFGGGTKLTVL

SEQ ID NO: 917 - protein, 125 aa, Artificial Sequence
  Synthetic peptide
EVQLVESGGGLVQPGGSLRLSCAASGFTFNSYAMNWVRQAPGKGLEWVARIRSKYNNYATYYADSVKGRFTISRDDSKNTAYLQMNSLKTEDTAVYYCVRHGNFGNSYVSWWAYWGQGTLVTVSS

SEQ ID NO: 918 - protein, 109 aa, Artificial Sequence; identical to SEQ ID NO: 906
  Synthetic peptide

SEQ ID NO: 919 - protein, 249 aa, Artificial Sequence
  Synthetic peptide
EVQLVESGGGLVQPGGSLRLSCAASGFTFNSYAMNWVRQAPGKGLEWVARIRSKYNNYATYYADSVKGRFTISRDDSKNTAYLQMNSLKTEDTAVYYCVRHGNFGNSYVSWWAYWGQGTLVTVSSGGGGSGGGGSGGGGSQTVVTQEPSLTVSPGGTVTLTCGSSTGAVTSGNYPNWVQQKPGQAPRGLIGGTKFLAPGTPARFSGSLLGGKAALTLSGVQPEDEAEYYCVLWYSNRWVFGGGTKLTVL

SEQ ID NO: 920 - protein, 120 aa, Artificial Sequence
  Synthetic peptide
EVQLLESGGGLVQPGGSLRLSCAASGFTFSSYAMSWVRQAPGKCLEWVSVISGSGGRPNYADSVKGRFTISRDNSKNTLYLQMNSLRDEDTAVYYCAKVDYSNYLFFDYWGQGTLVTVSS

SEQ ID NO: 921 - protein, 108 aa, Artificial Sequence
  Synthetic peptide
EIVLTQSPGTLSLSPGEGATLSCRAGQSVRSSYLGWYQQKPGQAPRLLIYGASSRATGIPDRFSGSGSGTDFTLTISRLEPEDFAVYYCQQYGYSPPTFGCGTKLEIK

SEQ ID NO: 922 - protein, 243 aa, Artificial Sequence
  Synthetic peptide
EVQLLESGGGLVQPGGSLRLSCAASGFTFSSYAMSWVRQAPGKCLEWVSVISGSGGRPNYADSVKGRFTISRDNSKNTLYLQMNSLRDEDTAVYYCAKVDYSNYLFFDYWGQGTLVTVSSGGGGSGGGGSGGGGSEIVLTQSPGTLSLSPGEGATLSCRAGQSVRSSYLGWYQQKPGQAPRLLIYGASSRATGIPDRFSGSGSGTDFTLTISRLEPEDFAVYYCQQYGYSPPTFGCGTKLEIK

SEQ ID NO: 923 - protein, 498 aa, Artificial Sequence
  Synthetic peptide
EVQLLESGGGLVQPGGSLRLSCAASGFTFSSYAMSWVRQAPGKCLEWVSVISGSGGRPNYADSVKGRFTISRDNSKNTLYLQMNSLRDEDTAVYYCAKVDYSNYLFFDYWGQGTLVTVSSGGGGSGGGGSGGGGSEIVLTQSPGTLSLSPGEGATLSCRAGQSVRSSYLGWYQQKPGQAPRLLIYGASSRATGIPDRFSGSGSGTDFTLTISRLEPEDFAVYYCQQYGYSPPTFGCGTKLEIKSGGGGSEVQLVESGGGLVQPGGSLKLSCAASGFTFNKYAMNWVRQAPGKGLEWVARIRSKYNNYATYYADSVKDRFTISRDDSKNTAYLQMNNLKTEDTAVYYCVRHGNFGNSYISYWAYWGQGTLVTVSSGGGGSGGGGSGGGGSQTVVTQEPSLTVSPGGTVTLTCGSSTGAVTSGNYPNWVQQKPGQAPRGLIGGTKFLAPGTPARFSGSLLGGKAALTLSGVQPEDEAEYYCVLWYSNRWVFGGGTKLTVL

SEQ ID NO: 924 - protein, 120 aa, Artificial Sequence
  Synthetic peptide
EVQLLESGGGLVQPGGSLKLSCAASGFTFSIYAMSWVRQAPGKCLEWVSAISGSGGSTFYADSVKGRFTISRDNSKNTLYLQMNSLRAEDTAVYYCAKHDYSNYPYFDYWGQGTLVTVSS

SEQ ID NO: 925 - protein, 108 aa, Artificial Sequence
  Synthetic peptide
EIVLTQSPGTLSLSPGERATLSCRASQSVRSSYLAWYQQKPGQAPRLLIYGASSRATGIPDRFSGSGSGTDFTLTISRLEPEDFAVYYCQQYGDLPFTFGCGTKLEIK

SEQ ID NO: 926 - protein, 243 aa, Artificial Sequence
  Synthetic peptide
EVQLLESGGGLVQPGGSLKLSCAASGFTFSIYAMSWVRQAPGKCLEWVSAISGSGGSTFYADSVKGRFTISRDNSKNTLYLQMNSLRAEDTAVYYCAKHDYSNYPYFDYWGQGTLVTVSSGGGGSGGGGSGGGGSEIVLTQSPGTLSLSPGERATLSCRASQSVRSSYLAWYQQKPGQAPRLLIYGASSRATGIPDRFSGSGSGTDFTLTISRLEPEDFAVYYCQQYGDLPFTFGCGTKLEIK

SEQ ID NO: 927 - protein, 498 aa, Artificial Sequence
  Synthetic peptide
EVQLLESGGGLVQPGGSLKLSCAASGFTFSIYAMSWVRQAPGKCLEWVSAISGSGGSTFYADSVKGRFTISRDNSKNTLYLQMNSLRAEDTAVYYCAKHDYSNYPYFDYWGQGTLVTVSSGGGGSGGGGSGGGGSEIVLTQSPGTLSLSPGERATLSCRASQSVRSSYLAWYQQKPGQAPRLLIYGASSRATGIPDRFSGSGSGTDFTLTISRLEPEDFAVYYCQQYGDLPFTFGCGTKLEIKSGGGGSEVQLVESGGGLVQPGGSLKLSCAASGFTFNKYAMNWVRQAPGKGLEWVARIRSKYNNYATYYADSVKDRFTISRDDSKNTAYLQMNNLKTEDTAVYYCVRHGNFGNSYISYWAYWGQGTLVTVSSGGGGSGGGGSGGGGSQTVVTQEPSLTVSPGGTVTLTCGSSTGAVTSGNYPNWVQQKPGQAPRGLIGGTKFLAPGTPARFSGSLLGGKAALTLSGVQPEDEAEYYCVLWYSNRWVFGGGTKLTVL

SEQ ID NO: 928 - protein, 120 aa, Artificial Sequence
  Synthetic peptide
EVQLLESGGGMVQPGGSLRLSCAASGFTFSSYAMSWVRQAPGKCLEWVSAISGSGGRTFYADSVEGRFTISRDNSKNTLFLQMNSLRAEDTAVYYCAKHDYSNYPYFDYWGQGTLVTVSS

SEQ ID NO: 929 - protein, 108 aa, Artificial Sequence
  Synthetic peptide
EIVLTQSPGTLSLSPGERATLSCRASQSVRSSYLAWYQQKPGQAPRLLIYGASSRATGIPDRFSGSGSGTDFTLTISRLEPEDFAVYYCQQYGSSPFTFGCGTKLEIK

SEQ ID NO: 930 - protein, 243 aa, Artificial Sequence
  Synthetic peptide
EVQLLESGGGMVQPGGSLRLSCAASGFTFSSYAMSWVRQAPGKCLEWVSAISGSGGRTFYADSVEGRFTISRDNSKNTLFLQMNSLRAEDTAVYYCAKHDYSNYPYFDYWGQGTLVTVSSGGGGSGGGGSGGGGSEIVLTQSPGTLSLSPGERATLSCRASQSVRSSYLAWYQQKPGQAPRLLIYGASSRATGIPDRFSGSGSGTDFTLTISRLEPEDFAVYYCQQYGSSPFTFGCGTKLEIK

SEQ ID NO: 931 - protein, 498 aa, Artificial Sequence
  Synthetic peptide
EVQLLESGGGMVQPGGSLRLSCAASGFTFSSYAMSWVRQAPGKCLEWVSAISGSGGRTFYADSVEGRFTISRDNSKNTLFLQMNSLRAEDTAVYYCAKHDYSNYPYFDYWGQGTLVTVSSGGGGSGGGGSGGGGSEIVLTQSPGTLSLSPGERATLSCRASQSVRSSYLAWYQQKPGQAPRLLIYGASSRATGIPDRFSGSGSGTDFTLTISRLEPEDFAVYYCQQYGSSPFTFGCGTKLEIKSGGGGSEVQLVESGGGLVQPGGSLKLSCAASGFTFNKYAMNWVRQAPGKGLEWVARIRSKYNNYATYYADSVKDRFTISRDDSKNTAYLQMNNLKTEDTAVYYCVRHGNFGNSYISYWAYWGQGTLVTVSSGGGGSGGGGSGGGGSQTVVTQEPSLTVSPGGTVTLTCGSSTGAVTSGNYPNWVQQKPGQAPRGLIGGTKFLAPGTPARFSGSLLGGKAALTLSGVQPEDEAEYYCVLWYSNRWVFGGGTKLTVL

SEQ ID NO: 932 - protein, 120 aa, Artificial Sequence
  Synthetic peptide
EVQLLESGGGMVQPGGSLRLSCAASGFTFSSYAMSWVRQAPGKCLEWVSAISGSGGRTFYADSVEGRFTISRDNSKNTLYLQMNSLRAEDTAVYYCAKHDYSNYPYFDYWGQGTLVTVSS

SEQ ID NO: 933 - protein, 108 aa, Artificial Sequence
  Synthetic peptide
EIVLTQSPGTLSLSPGERATLSCRASQSIRSSYLAWYQQKPGQAPRLLIYGASSRATGIPDRFSGSGSGTDFTLTISRLEPEDFAVYYCQQYGDLPFTFGCGTKLEIK

SEQ ID NO: 934 - protein, 243 aa, Artificial Sequence
  Synthetic peptide
EVQLLESGGGMVQPGGSLRLSCAASGFTFSSYAMSWVRQAPGKCLEWVSAISGSGGRTFYADSVEGRFTISRDNSKNTLYLQMNSLRAEDTAVYYCAKHDYSNYPYFDYWGQGTLVTVSSGGGGSGGGGSGGGGSEIVLTQSPGTLSLSPGERATLSCRASQSIRSSYLAWYQQKPGQAPRLLIYGASSRATGIPDRFSGSGSGTDFTLTISRLEPEDFAVYYCQQYGDLPFTFGCGTKLEIK

SEQ ID NO: 935 - protein, 498 aa, Artificial Sequence
  Synthetic peptide
EVQLLESGGGMVQPGGSLRLSCAASGFTFSSYAMSWVRQAPGKCLEWVSAISGSGGRTFYADSVEGRFTISRDNSKNTLYLQMNSLRAEDTAVYYCAKHDYSNYPYFDYWGQGTLVTVSSGGGGSGGGGSGGGGSEIVLTQSPGTLSLSPGERATLSCRASQSIRSSYLAWYQQKPGQAPRLLIYGASSRATGIPDRFSGSGSGTDFTLTISRLEPEDFAVYYCQQYGDLPFTFGCGTKLEIKSGGGGSEVQLVESGGGLVQPGGSLKLSCAASGFTFNKYAMNWVRQAPGKGLEWVARIRSKYNNYATYYADSVKDRFTISRDDSKNTAYLQMNNLKTEDTAVYYCVRHGNFGNSYISYWAYWGQGTLVTVSSGGGGSGGGGSGGGGSQTVVTQEPSLTVSPGGTVTLTCGSSTGAVTSGNYPNWVQQKPGQAPRGLIGGTKFLAPGTPARFSGSLLGGKAALTLSGVQPEDEAEYYCVLWYSNRWVFGGGTKLTVL

SEQ ID NO: 936 - protein, 120 aa, Artificial Sequence
  Synthetic peptide
EVQLLESGGGLVQSGGSLRLSCAASGFTFSSYAMSWVRQAPGKCLEWVSAISGSGGRTHYADSVKGRFTISRDNSKNTLYLQMNSLRAEDTAVYYCAKHDYSNYPYFDYWGQGTLVTVSS

SEQ ID NO: 937 - protein, 108 aa, Artificial Sequence; identical to SEQ ID NO: 929
  Synthetic peptide

SEQ ID NO: 938 - protein, 243 aa, Artificial Sequence
  Synthetic peptide
EVQLLESGGGLVQSGGSLRLSCAASGFTFSSYAMSWVRQAPGKCLEWVSAISGSGGRTHYADSVKGRFTISRDNSKNTLYLQMNSLRAEDTAVYYCAKHDYSNYPYFDYWGQGTLVTVSSGGGGSGGGGSGGGGSEIVLTQSPGTLSLSPGERATLSCRASQSVRSSYLAWYQQKPGQAPRLLIYGASSRATGIPDRFSGSGSGTDFTLTISRLEPEDFAVYYCQQYGSSPFTFGCGTKLEIK

SEQ ID NO: 939 - protein, 498 aa, Artificial Sequence
  Synthetic peptide
EVQLLESGGGLVQSGGSLRLSCAASGFTFSSYAMSWVRQAPGKCLEWVSAISGSGGRTHYADSVKGRFTISRDNSKNTLYLQMNSLRAEDTAVYYCAKHDYSNYPYFDYWGQGTLVTVSSGGGGSGGGGSGGGGSEIVLTQSPGTLSLSPGERATLSCRASQSVRSSYLAWYQQKPGQAPRLLIYGASSRATGIPDRFSGSGSGTDFTLTISRLEPEDFAVYYCQQYGSSPFTFGCGTKLEIKSGGGGSEVQLVESGGGLVQPGGSLKLSCAASGFTFNKYAMNWVRQAPGKGLEWVARIRSKYNNYATYYADSVKDRFTISRDDSKNTAYLQMNNLKTEDTAVYYCVRHGNFGNSYISYWAYWGQGTLVTVSSGGGGSGGGGSGGGGSQTVVTQEPSLTVSPGGTVTLTCGSSTGAVTSGNYPNWVQQKPGQAPRGLIGGTKFLAPGTPARFSGSLLGGKAALTLSGVQPEDEAEYYCVLWYSNRWVFGGGTKLTVL

SEQ ID NO: 940 - protein, 120 aa, Artificial Sequence
  Synthetic peptide
EVQLLESGGGLVQPGGSLRLSCAASGFTFSSYAMSWVRQAPGKCLEWVSLISGSGGRTHYADSVKGRFTISRDNSKNTLYLQMNSLRAEDTAVYYCAKHDYSNYPYFDYWGQGTLVTVSS

SEQ ID NO: 941 - protein, 108 aa, Artificial Sequence
  Synthetic peptide
EIVLTQSPGTLSLSPGERATLSCRASQSVRSTYLAWYQQKPGQAPRLLIYDASSRATGIPDRFSGSGSGTDFTLTISRLEPEDFAVYFCQQYGSSPPTFGCGTKLEIK

SEQ ID NO: 942 - protein, 243 aa, Artificial Sequence
  Synthetic peptide
EVQLLESGGGLVQPGGSLRLSCAASGFTFSSYAMSWVRQAPGKCLEWVSLISGSGGRTHYADSVKGRFTISRDNSKNTLYLQMNSLRAEDTAVYYCAKHDYSNYPYFDYWGQGTLVTVSSGGGGSGGGGSGGGGSEIVLTQSPGTLSLSPGERATLSCRASQSVRSTYLAWYQQKPGQAPRLLIYDASSRATGIPDRFSGSGSGTDFTLTISRLEPEDFAVYFCQQYGSSPPTFGCGTKLEIK

SEQ ID NO: 943 - protein, 498 aa, Artificial Sequence
  Synthetic peptide
EVQLLESGGGLVQPGGSLRLSCAASGFTFSSYAMSWVRQAPGKCLEWVSLISGSGGRTHYADSVKGRFTISRDNSKNTLYLQMNSLRAEDTAVYYCAKHDYSNYPYFDYWGQGTLVTVSSGGGGSGGGGSGGGGSEIVLTQSPGTLSLSPGERATLSCRASQSVRSTYLAWYQQKPGQAPRLLIYDASSRATGIPDRFSGSGSGTDFTLTISRLEPEDFAVYFCQQYGSSPPTFGCGTKLEIKSGGGGSEVQLVESGGGLVQPGGSLKLSCAASGFTFNKYAMNWVRQAPGKGLEWVARIRSKYNNYATYYADSVKDRFTISRDDSKNTAYLQMNNLKTEDTAVYYCVRHGNFGNSYISYWAYWGQGTLVTVSSGGGGSGGGGSGGGGSQTVVTQEPSLTVSPGGTVTLTCGSSTGAVTSGNYPNWVQQKPGQAPRGLIGGTKFLAPGTPARFSGSLLGGKAALTLSGVQPEDEAEYYCVLWYSNRWVFGGGTKLTVL

SEQ ID NO: 944 - protein, 120 aa, Artificial Sequence
  Synthetic peptide
EVQLLESGGGLVQPGGSLRLSCAASGFTFSTYAMSWVRQAPGKCLEWVSAISGSGGSTFYADSVKGRFTISRDNSKNTLSLQMNSLRAEDTAVYYCAKHDYSNYPYFDYWGQGTLVTVSS

SEQ ID NO: 945 - protein, 108 aa, Artificial Sequence; identical to SEQ ID NO: 925
  Synthetic peptide

SEQ ID NO: 946 - protein, 243 aa, Artificial Sequence
  Synthetic peptide
EVQLLESGGGLVQPGGSLRLSCAASGFTFSTYAMSWVRQAPGKCLEWVSAISGSGGSTFYADSVKGRFTISRDNSKNTLSLQMNSLRAEDTAVYYCAKHDYSNYPYFDYWGQGTLVTVSSGGGGSGGGGSGGGGSEIVLTQSPGTLSLSPGERATLSCRASQSVRSSYLAWYQQKPGQAPRLLIYGASSRATGIPDRFSGSGSGTDFTLTISRLEPEDFAVYYCQQYGDLPFTFGCGTKLEIK

SEQ ID NO: 947 - protein, 498 aa, Artificial Sequence
  Synthetic peptide
EVQLLESGGGLVQPGGSLRLSCAASGFTFSTYAMSWVRQAPGKCLEWVSAISGSGGSTFYADSVKGRFTISRDNSKNTLSLQMNSLRAEDTAVYYCAKHDYSNYPYFDYWGQGTLVTVSSGGGGSGGGGSGGGGSEIVLTQSPGTLSLSPGERATLSCRASQSVRSSYLAWYQQKPGQAPRLLIYGASSRATGIPDRFSGSGSGTDFTLTISRLEPEDFAVYYCQQYGDLPFTFGCGTKLEIKSGGGGSEVQLVESGGGLVQPGGSLKLSCAASGFTFNKYAMNWVRQAPGKGLEWVARIRSKYNNYATYYADSVKDRFTISRDDSKNTAYLQMNNLKTEDTAVYYCVRHGNFGNSYISYWAYWGQGTLVTVSSGGGGSGGGGSGGGGSQTVVTQEPSLTVSPGGTVTLTCGSSTGAVTSGNYPNWVQQKPGQAPRGLIGGTKFLAPGTPARFSGSLLGGKAALTLSGVQPEDEAEYYCVLWYSNRWVFGGGTKLTVL

SEQ ID NO: 948 - protein, 119 aa, Artificial Sequence
  Synthetic peptide
EVQLLESGGGMVQPGGSLRLSCAASGFTFSTYAMSWVRQAPGKCLEWVSAISGSGGRTFYADSVEGRFTISRDNSKNTLYLQMNSLRAEDTAVYYCAKHDYSNYPYFDYWGQGTLVTVS

SEQ ID NO: 949 - protein, 108 aa, Artificial Sequence
  Synthetic peptide
EIVLTQSPGTLSLSPGERATLSCRASQSVRSTYLAWYQQKPGQAPRLLIYGASSRATGIPDRFSGSGSGTDFTLTISRLEPEDFAVYSCQQYGDLPFTFGCGTKLEIK

SEQ ID NO: 950 - protein, 243 aa, Artificial Sequence
  Synthetic peptide
EVQLLESGGGMVQPGGSLRLSCAASGFTFSTYAMSWVRQAPGKCLEWVSAISGSGGRTFYADSVEGRFTISRDNSKNTLYLQMNSLRAEDTAVYYCAKHDYSNYPYFDYWGQGTLVTVSSGGGGSGGGGSGGGGSEIVLTQSPGTLSLSPGERATLSCRASQSVRSTYLAWYQQKPGQAPRLLIYGASSRATGIPDRFSGSGSGTDFTLTISRLEPEDFAVYSCQQYGDLPFTFGCGTKLEIK

SEQ ID NO: 951 - protein, 498 aa, Artificial Sequence
  Synthetic peptide
EVQLLESGGGMVQPGGSLRLSCAASGFTFSTYAMSWVRQAPGKCLEWVSAISGSGGRTFYADSVEGRFTISRDNSKNTLYLQMNSLRAEDTAVYYCAKHDYSNYPYFDYWGQGTLVTVSSGGGGSGGGGSGGGGSEIVLTQSPGTLSLSPGERATLSCRASQSVRSTYLAWYQQKPGQAPRLLIYGASSRATGIPDRFSGSGSGTDFTLTISRLEPEDFAVYSCQQYGDLPFTFGCGTKLEIKSGGGGSEVQLVESGGGLVQPGGSLKLSCAASGFTFNKYAMNWVRQAPGKGLEWVARIRSKYNNYATYYADSVKDRFTISRDDSKNTAYLQMNNLKTEDTAVYYCVRHGNFGNSYISYWAYWGQGTLVTVSSGGGGSGGGGSGGGGSQTVVTQEPSLTVSPGGTVTLTCGSSTGAVTSGNYPNWVQQKPGQAPRGLIGGTKFLAPGTPARFSGSLLGGKAALTLSGVQPEDEAEYYCVLWYSNRWVFGGGTKLTVL

SEQ ID NO: 952 - protein, 120 aa, Artificial Sequence
  Synthetic peptide
EVQLLESGGGLVQPGGSLRLSCAASGFTFSSYAMSWVRQAPGKCLEWVSAISGSGGYTYYADSVKGRFTISRDNSKNTLYLQMNSLRAEDTAVYYCAKHDYSNYPYFDYWGQGTLVTVSS

SEQ ID NO: 953 - protein, 108 aa, Artificial Sequence
  Synthetic peptide
EIVLTQSPGTLSLSPGERATLSCRASQSVRSNYLAWYQQKPGQAPRLLIYGASSRATGIPDRFSGSGSGTDFTLTISRLEPEDFAVYYCQQYGDLPFTFGCGTKVEIK

SEQ ID NO: 954 - protein, 243 aa, Artificial Sequence
  Synthetic peptide
EVQLLESGGGLVQPGGSLRLSCAASGFTFSSYAMSWVRQAPGKCLEWVSAISGSGGYTYYADSVKGRFTISRDNSKNTLYLQMNSLRAEDTAVYYCAKHDYSNYPYFDYWGQGTLVTVSSGGGGSGGGGSGGGGSEIVLTQSPGTLSLSPGERATLSCRASQSVRSNYLAWYQQKPGQAPRLLIYGASSRATGIPDRFSGSGSGTDFTLTISRLEPEDFAVYYCQQYGDLPFTFGCGTKVEIK

SEQ ID NO: 955 - protein, 498 aa, Artificial Sequence
  Synthetic peptide
EVQLLESGGGLVQPGGSLRLSCAASGFTFSSYAMSWVRQAPGKCLEWVSAISGSGGYTYYADSVKGRFTISRDNSKNTLYLQMNSLRAEDTAVYYCAKHDYSNYPYFDYWGQGTLVTVSSGGGGSGGGGSGGGGSEIVLTQSPGTLSLSPGERATLSCRASQSVRSNYLAWYQQKPGQAPRLLIYGASSRATGIPDRFSGSGSGTDFTLTISRLEPEDFAVYYCQQYGDLPFTFGCGTKVEIKSGGGGSEVQLVESGGGLVQPGGSLKLSCAASGFTFNKYAMNWVRQAPGKGLEWVARIRSKYNNYATYYADSVKDRFTISRDDSKNTAYLQMNNLKTEDTAVYYCVRHGNFGNSYISYWAYWGQGTLVTVSSGGGGSGGGGSGGGGSQTVVTQEPSLTVSPGGTVTLTCGSSTGAVTSGNYPNWVQQKPGQAPRGLIGGTKFLAPGTPARFSGSLLGGKAALTLSGVQPEDEAEYYCVLWYSNRWVFGGGTKLTVL

SEQ ID NO: 956 - protein, 120 aa, Artificial Sequence
  Synthetic peptide
EVQLLESGGGLAQPGGSLRLSCAASGFTFSSYAMSWVRQAPGKCLEWVSAISGSGGSTFYADSVKGRFTISRDNSKNTLYLQMNSLRAEDTAVYFCAKHDYSNYPYFDYWGQGTLVTVSS

SEQ ID NO: 957 - protein, 108 aa, Artificial Sequence; identical to SEQ ID NO: 638
  Synthetic peptide

SEQ ID NO: 958 - protein, 243 aa, Artificial Sequence
  Synthetic peptide
EVQLLESGGGLAQPGGSLRLSCAASGFTFSSYAMSWVRQAPGKCLEWVSAISGSGGSTFYADSVKGRFTISRDNSKNTLYLQMNSLRAEDTAVYFCAKHDYSNYPYFDYWGQGTLVTVSSGGGGSGGGGSGGGGSEIVLTQSPGTLSLSPGERATLSCRASQSVRSSYLAWYQQKPGQAPRLLIYGASSRATGIPDRFSGSGSGTDFTLTISRLEPEDFAVYYCQQYGDLPFTFGCGTKVEIK

SEQ ID NO: 959 - protein, 498 aa, Artificial Sequence
  Synthetic peptide
EVQLLESGGGLAQPGGSLRLSCAASGFTFSSYAMSWVRQAPGKCLEWVSAISGSGGSTFYADSVKGRFTISRDNSKNTLYLQMNSLRAEDTAVYFCAKHDYSNYPYFDYWGQGTLVTVSSGGGGSGGGGSGGGGSEIVLTQSPGTLSLSPGERATLSCRASQSVRSSYLAWYQQKPGQAPRLLIYGASSRATGIPDRFSGSGSGTDFTLTISRLEPEDFAVYYCQQYGDLPFTFGCGTKVEIKSGGGGSEVQLVESGGGLVQPGGSLKLSCAASGFTFNKYAMNWVRQAPGKGLEWVARIRSKYNNYATYYADSVKDRFTISRDDSKNTAYLQMNNLKTEDTAVYYCVRHGNFGNSYISYWAYWGQGTLVTVSSGGGGSGGGGSGGGGSQTVVTQEPSLTVSPGGTVTLTCGSSTGAVTSGNYPNWVQQKPGQAPRGLIGGTKFLAPGTPARFSGSLLGGKAALTLSGVQPEDEAEYYCVLWYSNRWVFGGGTKLTVL

SEQ ID NO: 960 - protein, 120 aa, Artificial Sequence; identical to SEQ ID NO: 932
  Synthetic peptide

SEQ ID NO: 961 - protein, 108 aa, Artificial Sequence; identical to SEQ ID NO: 953
  Synthetic peptide

SEQ ID NO: 962 - protein, 243 aa, Artificial Sequence
  Synthetic peptide
EVQLLESGGGMVQPGGSLRLSCAASGFTFSSYAMSWVRQAPGKCLEWVSAISGSGGRTFYADSVEGRFTISRDNSKNTLYLQMNSLRAEDTAVYYCAKHDYSNYPYFDYWGQGTLVTVSSGGGGSGGGGSGGGGSEIVLTQSPGTLSLSPGERATLSCRASQSVRSNYLAWYQQKPGQAPRLLIYGASSRATGIPDRFSGSGSGTDFTLTISRLEPEDFAVYYCQQYGDLPFTFGCGTKVEIK

SEQ ID NO: 963 - protein, 498 aa, Artificial Sequence
  Synthetic peptide
EVQLLESGGGMVQPGGSLRLSCAASGFTFSSYAMSWVRQAPGKCLEWVSAISGSGGRTFYADSVEGRFTISRDNSKNTLYLQMNSLRAEDTAVYYCAKHDYSNYPYFDYWGQGTLVTVSSGGGGSGGGGSGGGGSEIVLTQSPGTLSLSPGERATLSCRASQSVRSNYLAWYQQKPGQAPRLLIYGASSRATGIPDRFSGSGSGTDFTLTISRLEPEDFAVYYCQQYGDLPFTFGCGTKVEIKSGGGGSEVQLVESGGGLVQPGGSLKLSCAASGFTFNKYAMNWVRQAPGKGLEWVARIRSKYNNYATYYADSVKDRFTISRDDSKNTAYLQMNNLKTEDTAVYYCVRHGNFGNSYISYWAYWGQGTLVTVSSGGGGSGGGGSGGGGSQTVVTQEPSLTVSPGGTVTLTCGSSTGAVTSGNYPNWVQQKPGQAPRGLIGGTKFLAPGTPARFSGSLLGGKAALTLSGVQPEDEAEYYCVLWYSNRWVFGGGTKLTVL

SEQ ID NO: 964 - protein, 120 aa, Artificial Sequence; identical to SEQ ID NO: 932
  Synthetic peptide

SEQ ID NO: 965 - protein, 108 aa, Artificial Sequence
  Synthetic peptide
EIVLTQSPGTLSLSPGERATLSCRASQSVRSSYLAWYQQKPGQAPRLLIYGASSRATGIPDRFSGSGSGTDFTLTISRLEPEDFAVYYCQQYGSSPFTFGCGTKVEIK

SEQ ID NO: 966 - protein, 243 aa, Artificial Sequence
  Synthetic peptide
EVQLLESGGGMVQPGGSLRLSCAASGFTFSSYAMSWVRQAPGKCLEWVSAISGSGGRTFYADSVEGRFTISRDNSKNTLYLQMNSLRAEDTAVYYCAKHDYSNYPYFDYWGQGTLVTVSSGGGGSGGGGSGGGGSEIVLTQSPGTLSLSPGERATLSCRASQSVRSSYLAWYQQKPGQAPRLLIYGASSRATGIPDRFSGSGSGTDFTLTISRLEPEDFAVYYCQQYGSSPFTFGCGTKVEIK

SEQ ID NO: 967 - protein, 498 aa, Artificial Sequence
  Synthetic peptide
EVQLLESGGGMVQPGGSLRLSCAASGFTFSSYAMSWVRQAPGKCLEWVSAISGSGGRTFYADSVEGRFTISRDNSKNTLYLQMNSLRAEDTAVYYCAKHDYSNYPYFDYWGQGTLVTVSSGGGGSGGGGSGGGGSEIVLTQSPGTLSLSPGERATLSCRASQSVRSSYLAWYQQKPGQAPRLLIYGASSRATGIPDRFSGSGSGTDFTLTISRLEPEDFAVYYCQQYGSSPFTFGCGTKVEIKSGGGGSEVQLVESGGGLVQPGGSLKLSCAASGFTFNKYAMNWVRQAPGKGLEWVARIRSKYNNYATYYADSVKDRFTISRDDSKNTAYLQMNNLKTEDTAVYYCVRHGNFGNSYISYWAYWGQGTLVTVSSGGGGSGGGGSGGGGSQTVVTQEPSLTVSPGGTVTLTCGSSTGAVTSGNYPNWVQQKPGQAPRGLIGGTKFLAPGTPARFSGSLLGGKAALTLSGVQPEDEAEYYCVLWYSNRWVFGGGTKLTVL

SEQ ID NO: 968 - protein, 120 aa, Artificial Sequence; identical to SEQ ID NO: 737
  Synthetic peptide

SEQ ID NO: 969 - protein, 108 aa, Artificial Sequence
  Synthetic peptide
EIVLTQSPGTLSLSPGERATLSCRASQSVRGNYLAWYQQKPGQAPRLLIYGASSRATGIPDRFSGSGSGTDFTLTISRLEPEDFAVYYCQQYGYSPFTFGPGTKVEIK

SEQ ID NO: 970 - protein, 243 aa, Artificial Sequence
  Synthetic peptide
EVQLLESGGGLVQPGGSLRLSCAASGFTFSSYAMSWVRQAPGKGLEWVSAISGSGGSTFYADSVQGRFTISRDNSKNTLYLQVNSLRAEDTAVYYCARHDYSNYPYFDYWGQGTLVTVSSGGGGSGGGGSGGGGSEIVLTQSPGTLSLSPGERATLSCRASQSVRGNYLAWYQQKPGQAPRLLIYGASSRATGIPDRFSGSGSGTDFTLTISRLEPEDFAVYYCQQYGYSPFTFGPGTKVEIK

SEQ ID NO: 971 - protein, 498 aa, Artificial Sequence
  Synthetic peptide
EVQLLESGGGLVQPGGSLRLSCAASGFTFSSYAMSWVRQAPGKGLEWVSAISGSGGSTFYADSVQGRFTISRDNSKNTLYLQVNSLRAEDTAVYYCARHDYSNYPYFDYWGQGTLVTVSSGGGGSGGGGSGGGGSEIVLTQSPGTLSLSPGERATLSCRASQSVRGNYLAWYQQKPGQAPRLLIYGASSRATGIPDRFSGSGSGTDFTLTISRLEPEDFAVYYCQQYGYSPFTFGPGTKVEIKSGGGGSEVQLVESGGGLVQPGGSLKLSCAASGFTFNKYAMNWVRQAPGKGLEWVARIRSKYNNYATYYADSVKDRFTISRDDSKNTAYLQMNNLKTEDTAVYYCVRHGNFGNSYISYWAYWGQGTLVTVSSGGGGSGGGGSGGGGSQTVVTQEPSLTVSPGGTVTLTCGSSTGAVTSGNYPNWVQQKPGQAPRGLIGGTKFLAPGTPARFSGSLLGGKAALTLSGVQPEDEAEYYCVLWYSNRWVFGGGTKLTVL

SEQ ID NO: 972 - protein, 120 aa, Artificial Sequence
  Synthetic peptide
EVQLLESGGGLVQPGGSLRLSCAASGFTFSSYAMSWVRQAPGKCLEWVSAISGSGGSTFYADSVQGRFTISRDNSKNTLYLQVNSLRAEDTAVYYCARHDYSNYPYFDYWGQGTLVTVSS

SEQ ID NO: 973 - protein, 108 aa, Artificial Sequence
  Synthetic peptide
EIVLTQSPGTLSLSPGERATLSCRASQSVRGNYLAWYQQKPGQAPRLLIYGASSRATGIPDRFSGSGSGTDFTLTISRLEPEDFAVYYCQQYGYSPFTFGCGTKVEIK

SEQ ID NO: 974 - protein, 243 aa, Artificial Sequence
  Synthetic peptide
EVQLLESGGGLVQPGGSLRLSCAASGFTFSSYAMSWVRQAPGKCLEWVSAISGSGGSTFYADSVQGRFTISRDNSKNTLYLQVNSLRAEDTAVYYCARHDYSNYPYFDYWGQGTLVTVSSGGGGSGGGGSGGGGSEIVLTQSPGTLSLSPGERATLSCRASQSVRGNYLAWYQQKPGQAPRLLIYGASSRATGIPDRFSGSGSGTDFTLTISRLEPEDFAVYYCQQYGYSPFTFGCGTKVEIK

SEQ ID NO: 975 - protein, 498 aa, Artificial Sequence
  Synthetic peptide
EVQLLESGGGLVQPGGSLRLSCAASGFTFSSYAMSWVRQAPGKCLEWVSAISGSGGSTFYADSVQGRFTISRDNSKNTLYLQVNSLRAEDTAVYYCARHDYSNYPYFDYWGQGTLVTVSSGGGGSGGGGSGGGGSEIVLTQSPGTLSLSPGERATLSCRASQSVRGNYLAWYQQKPGQAPRLLIYGASSRATGIPDRFSGSGSGTDFTLTISRLEPEDFAVYYCQQYGYSPFTFGCGTKVEIKSGGGGSEVQLVESGGGLVQPGGSLKLSCAASGFTFNKYAMNWVRQAPGKGLEWVARIRSKYNNYATYYADSVKDRFTISRDDSKNTAYLQMNNLKTEDTAVYYCVRHGNFGNSYISYWAYWGQGTLVTVSSGGGGSGGGGSGGGGSQTVVTQEPSLTVSPGGTVTLTCGSSTGAVTSGNYPNWVQQKPGQAPRGLIGGTKFLAPGTPARFSGSLLGGKAALTLSGVQPEDEAEYYCVLWYSNRWVFGGGTKLTVL

SEQ ID NO: 976 - protein, 120 aa, Artificial Sequence
  Synthetic peptide
EVQLLESGGGLVQPGGSLRLSCAASGFTFSTYAMSWVRQAPGKCLEWVSAISGSGGGTFYADSVKGRFTISRDNSKNTLYLQMNSLRAEDTAVYYCAKHDYSNYPYFDYWGQGTLVTVSS

SEQ ID NO: 977 - protein, 108 aa, Artificial Sequence
  Synthetic peptide
EIVLTQSPGTLSLSPGERATLSCRASQSIRSNYLAWYQQKPGQAPRLLIYGASSRATGIPDRFSGSGSGTDFTLTISRLEPEDFAVYYCQQYGSSPFTFGCGTKVEIK

SEQ ID NO: 978 - protein, 243 aa, Artificial Sequence
  Synthetic peptide
EVQLLESGGGLVQPGGSLRLSCAASGFTFSTYAMSWVRQAPGKCLEWVSAISGSGGGTFYADSVKGRFTISRDNSKNTLYLQMNSLRAEDTAVYYCAKHDYSNYPYFDYWGQGTLVTVSSGGGGSGGGGSGGGGSEIVLTQSPGTLSLSPGERATLSCRASQSIRSNYLAWYQQKPGQAPRLLIYGASSRATGIPDRFSGSGSGTDFTLTISRLEPEDFAVYYCQQYGSSPFTFGCGTKVEIK

SEQ ID NO: 979 - protein, 498 aa, Artificial Sequence
  Synthetic peptide
EVQLLESGGGLVQPGGSLRLSCAASGFTFSTYAMSWVRQAPGKCLEWVSAISGSGGGTFYADSVKGRFTISRDNSKNTLYLQMNSLRAEDTAVYYCAKHDYSNYPYFDYWGQGTLVTVSSGGGGSGGGGSGGGGSEIVLTQSPGTLSLSPGERATLSCRASQSIRSNYLAWYQQKPGQAPRLLIYGASSRATGIPDRFSGSGSGTDFTLTISRLEPEDFAVYYCQQYGSSPFTFGCGTKVEIKSGGGGSEVQLVESGGGLVQPGGSLKLSCAASGFTFNKYAMNWVRQAPGKGLEWVARIRSKYNNYATYYADSVKDRFTISRDDSKNTAYLQMNNLKTEDTAVYYCVRHGNFGNSYISYWAYWGQGTLVTVSSGGGGSGGGGSGGGGSQTVVTQEPSLTVSPGGTVTLTCGSSTGAVTSGNYPNWVQQKPGQAPRGLIGGTKFLAPGTPARFSGSLLGGKAALTLSGVQPEDEAEYYCVLWYSNRWVFGGGTKLTVL

SEQ ID NO: 980 - protein, 120 aa, Artificial Sequence
  Synthetic peptide
EVQLLESGGGLVQPGGSLRLSCAASGFTFSTYAMSWVRQAPGKCLEWVSLISGSGGRTYYADSVKGRFTISRDNSKNTLYLQMNSLRAEDTAVYYCAKHDYSNYPYFDYWGQGTLVTVSS

SEQ ID NO: 981 - protein, 108 aa, Artificial Sequence
  Synthetic peptide
EIVLTQSPGTLSLSPGERATLSCRASQSVRSNYLAWYQQKPGQAPRLLIYGASNRATGIPDRFSGSGSGTDFTLTISRLEPEDFAVYSCQQYGISPPTFGCGTKVEIK

SEQ ID NO: 982 - protein, 243 aa, Artificial Sequence
  Synthetic peptide
EVQLLESGGGLVQPGGSLRLSCAASGFTFSTYAMSWVRQAPGKCLEWVSLISGSGGRTYYADSVKGRFTISRDNSKNTLYLQMNSLRAEDTAVYYCAKHDYSNYPYFDYWGQGTLVTVSSGGGGSGGGGSGGGGSEIVLTQSPGTLSLSPGERATLSCRASQSVRSNYLAWYQQKPGQAPRLLIYGASNRATGIPDRFSGSGSGTDFTLTISRLEPEDFAVYSCQQYGISPPTFGCGTKVEIK

SEQ ID NO: 983 - protein, 498 aa, Artificial Sequence
  Synthetic peptide
EVQLLESGGGLVQPGGSLRLSCAASGFTFSTYAMSWVRQAPGKCLEWVSLISGSGGRTYYADSVKGRFTISRDNSKNTLYLQMNSLRAEDTAVYYCAKHDYSNYPYFDYWGQGTLVTVSSGGGGSGGGGSGGGGSEIVLTQSPGTLSLSPGERATLSCRASQSVRSNYLAWYQQKPGQAPRLLIYGASNRATGIPDRFSGSGSGTDFTLTISRLEPEDFAVYSCQQYGISPPTFGCGTKVEIKSGGGGSEVQLVESGGGLVQPGGSLKLSCAASGFTFNKYAMNWVRQAPGKGLEWVARIRSKYNNYATYYADSVKDRFTISRDDSKNTAYLQMNNLKTEDTAVYYCVRHGNFGNSYISYWAYWGQGTLVTVSSGGGGSGGGGSGGGGSQTVVTQEPSLTVSPGGTVTLTCGSSTGAVTSGNYPNWVQQKPGQAPRGLIGGTKFLAPGTPARFSGSLLGGKAALTLSGVQPEDEAEYYCVLWYSNRWVFGGGTKLTVL

SEQ ID NO: 984 - protein, 120 aa, Artificial Sequence
  Synthetic peptide
EVQLLESGGGLVQPGGSLRLSCAASGFTFSSYAMSWVRQSPGKCLEWVSAISGSGGRAQYADSVQGRFTVSRDNSKNTLYLQMNSLRAEDTAVYYCAKHDYSNYPYFDYWGQGTLVTVSS

SEQ ID NO: 985 - protein, 107 aa, Artificial Sequence
  Synthetic peptide
EIVLTQSPATLSVSPGERATLSCRASQSVSSNLAWYQQKPGQAPRLLIYGSSSRATGIPDRFSGSGSGTDFTLTISRLEPEDFAVYYCQQYGSSPPPFGCGTKVEIK

SEQ ID NO: 986 - protein, 242 aa, Artificial Sequence
  Synthetic peptide
EVQLLESGGGLVQPGGSLRLSCAASGFTFSSYAMSWVRQSPGKCLEWVSAISGSGGRAQYADSVQGRFTVSRDNSKNTLYLQMNSLRAEDTAVYYCAKHDYSNYPYFDYWGQGTLVTVSSGGGGSGGGGSGGGGSEIVLTQSPATLSVSPGERATLSCRASQSVSSNLAWYQQKPGQAPRLLIYGSSSRATGIPDRFSGSGSGTDFTLTISRLEPEDFAVYYCQQYGSSPPPFGCGTKVEIK

SEQ ID NO: 987 - protein, 497 aa, Artificial Sequence
  Synthetic peptide
EVQLLESGGGLVQPGGSLRLSCAASGFTFSSYAMSWVRQSPGKCLEWVSAISGSGGRAQYADSVQGRFTVSRDNSKNTLYLQMNSLRAEDTAVYYCAKHDYSNYPYFDYWGQGTLVTVSSGGGGSGGGGSGGGGSEIVLTQSPATLSVSPGERATLSCRASQSVSSNLAWYQQKPGQAPRLLIYGSSSRATGIPDRFSGSGSGTDFTLTISRLEPEDFAVYYCQQYGSSPPPFGCGTKVEIKSGGGGSEVQLVESGGGLVQPGGSLKLSCAASGFTFNKYAMNWVRQAPGKGLEWVARIRSKYNNYATYYADSVKDRFTISRDDSKNTAYLQMNNLKTEDTAVYYCVRHGNFGNSYISYWAYWGQGTLVTVSSGGGGSGGGGSGGGGSQTVVTQEPSLTVSPGGTVTLTCGSSTGAVTSGNYPNWVQQKPGQAPRGLIGGTKFLAPGTPARFSGSLLGGKAALTLSGVQPEDEAEYYCVLWYSNRWVFGGGTKLTVL

SEQ ID NO: 988 - protein, 120 aa, Artificial Sequence
  Synthetic peptide
EVQLLESGGGMVQPGGSLRLSCAASGFTFSSYAMSWVRQAPGKCLEWVSAISGSGGRTFYADSVEGRFTISRDNSKNTLYLQMNSLRAEDTAVYYCTKHDYSNYPYFDYWGQGTLVTVSS

SEQ ID NO: 989 - protein, 108 aa, Artificial Sequence
  Synthetic peptide
EIVLTQSPGTLSLSPGERATLSCRASQGVRSDYLAWYQQKPGQAPRLLIYGASSRATGIPDRFSGSGSGTDFTLTISRLEPEDFAVYHCQQYGSTPPTFGCGTKVEIK

SEQ ID NO: 990 - protein, 243 aa, Artificial Sequence
  Synthetic peptide
EVQLLESGGGMVQPGGSLRLSCAASGFTFSSYAMSWVRQAPGKCLEWVSAISGSGGRTFYADSVEGRFTISRDNSKNTLYLQMNSLRAEDTAVYYCTKHDYSNYPYFDYWGQGTLVTVSSGGGGSGGGGSGGGGSEIVLTQSPGTLSLSPGERATLSCRASQGVRSDYLAWYQQKPGQAPRLLIYGASSRATGIPDRFSGSGSGTDFTLTISRLEPEDFAVYHCQQYGSTPPTFGCGTKVEIK

SEQ ID NO: 991 - protein, 498 aa, Artificial Sequence
  Synthetic peptide
EVQLLESGGGMVQPGGSLRLSCAASGFTFSSYAMSWVRQAPGKCLEWVSAISGSGGRTFYADSVEGRFTISRDNSKNTLYLQMNSLRAEDTAVYYCTKHDYSNYPYFDYWGQGTLVTVSSGGGGSGGGGSGGGGSEIVLTQSPGTLSLSPGERATLSCRASQGVRSDYLAWYQQKPGQAPRLLIYGASSRATGIPDRFSGSGSGTDFTLTISRLEPEDFAVYHCQQYGSTPPTFGCGTKVEIKSGGGGSEVQLVESGGGLVQPGGSLKLSCAASGFTFNKYAMNWVRQAPGKGLEWVARIRSKYNNYATYYADSVKDRFTISRDDSKNTAYLQMNNLKTEDTAVYYCVRHGNFGNSYISYWAYWGQGTLVTVSSGGGGSGGGGSGGGGSQTVVTQEPSLTVSPGGTVTLTCGSSTGAVTSGNYPNWVQQKPGQAPRGLIGGTKFLAPGTPARFSGSLLGGKAALTLSGVQPEDEAEYYCVLWYSNRWVFGGGTKLTVL

SEQ ID NO: 992 - protein, 120 aa, Artificial Sequence
  Synthetic peptide
EVQLLESGGGLVQPGGSLRLSCAASGFTFSSYAMSWVRQAPGKCLEWVSAIGDGGGYTYYADSVKGRFTISRDNSKNTLSLLMNSLRAEDTAVYYCARHDYSNYPYFDYWGQGTLVTVSS

SEQ ID NO: 993 - protein, 108 aa, Artificial Sequence
  Synthetic peptide
EIVLTQSPGTLSLSPGERATLSCRASQGVRSSYFAWYQQKPGQAPRLLIYGASTRATGIPARFSGSGSGTDFTLTISRLEPEDFAVYYCQQYGSSPPTFGCGTKVEIK

SEQ ID NO: 994 - protein, 243 aa, Artificial Sequence
  Synthetic peptide
EVQLLESGGGLVQPGGSLRLSCAASGFTFSSYAMSWVRQAPGKCLEWVSAIGDGGGYTYYADSVKGRFTISRDNSKNTLSLLMNSLRAEDTAVYYCARHDYSNYPYFDYWGQGTLVTVSSGGGGSGGGGSGGGGSEIVLTQSPGTLSLSPGERATLSCRASQGVRSSYFAWYQQKPGQAPRLLIYGASTRATGIPARFSGSGSGTDFTLTISRLEPEDFAVYYCQQYGSSPPTFGCGTKVEIK

SEQ ID NO: 995 - protein, 498 aa, Artificial Sequence
  Synthetic peptide
EVQLLESGGGLVQPGGSLRLSCAASGFTFSSYAMSWVRQAPGKCLEWVSAIGDGGGYTYYADSVKGRFTISRDNSKNTLSLLMNSLRAEDTAVYYCARHDYSNYPYFDYWGQGTLVTVSSGGGGSGGGGSGGGGSEIVLTQSPGTLSLSPGERATLSCRASQGVRSSYFAWYQQKPGQAPRLLIYGASTRATGIPARFSGSGSGTDFTLTISRLEPEDFAVYYCQQYGSSPPTFGCGTKVEIKSGGGGSEVQLVESGGGLVQPGGSLKLSCAASGFTFNKYAMNWVRQAPGKGLEWVARIRSKYNNYATYYADSVKDRFTISRDDSKNTAYLQMNNLKTEDTAVYYCVRHGNFGNSYISYWAYWGQGTLVTVSSGGGGSGGGGSGGGGSQTVVTQEPSLTVSPGGTVTLTCGSSTGAVTSGNYPNWVQQKPGQAPRGLIGGTKFLAPGTPARFSGSLLGGKAALTLSGVQPEDEAEYYCVLWYSNRWVFGGGTKLTVL

SEQ ID NO: 996 - protein, 120 aa, Artificial Sequence
  Synthetic peptide
EVQLLESGGGVVQPGRSLRLSCAASGFTFSSYAMSWVRQAPGKCLEWVSAISGSGGRTFYADSVEGRFTISRDNSKNTLYLQMNSLRAEDTAVYYCAKHDYSNYPYFDYWGQGTLVTVSS

SEQ ID NO: 997 - protein, 108 aa, Artificial Sequence
  Synthetic peptide
EIVLTQSPGTLSLSPGERATLSCRASQSIRSNYLAWYQQKPGQAPRLLIYGASSRATGIPDRFSGSGSGTDFTLTISRLEPEDFAVYYCQQYGSSPPSFGCGTKVEIK

SEQ ID NO: 998 - protein, 243 aa, Artificial Sequence
  Synthetic peptide
EVQLLESGGGVVQPGRSLRLSCAASGFTFSSYAMSWVRQAPGKCLEWVSAISGSGGRTFYADSVEGRFTISRDNSKNTLYLQMNSLRAEDTAVYYCAKHDYSNYPYFDYWGQGTLVTVSSGGGGSGGGGSGGGGSEIVLTQSPGTLSLSPGERATLSCRASQSIRSNYLAWYQQKPGQAPRLLIYGASSRATGIPDRFSGSGSGTDFTLTISRLEPEDFAVYYCQQYGSSPPSFGCGTKVEIK

SEQ ID NO: 999 - protein, 498 aa, Artificial Sequence
  Synthetic peptide
EVQLLESGGGVVQPGRSLRLSCAASGFTFSSYAMSWVRQAPGKCLEWVSAISGSGGRTFYADSVEGRFTISRDNSKNTLYLQMNSLRAEDTAVYYCAKHDYSNYPYFDYWGQGTLVTVSSGGGGSGGGGSGGGGSEIVLTQSPGTLSLSPGERATLSCRASQSIRSNYLAWYQQKPGQAPRLLIYGASSRATGIPDRFSGSGSGTDFTLTISRLEPEDFAVYYCQQYGSSPPSFGCGTKVEIKSGGGGSEVQLVESGGGLVQPGGSLKLSCAASGFTFNKYAMNWVRQAPGKGLEWVARIRSKYNNYATYYADSVKDRFTISRDDSKNTAYLQMNNLKTEDTAVYYCVRHGNFGNSYISYWAYWGQGTLVTVSSGGGGSGGGGSGGGGSQTVVTQEPSLTVSPGGTVTLTCGSSTGAVTSGNYPNWVQQKPGQAPRGLIGGTKFLAPGTPARFSGSLLGGKAALTLSGVQPEDEAEYYCVLWYSNRWVFGGGTKLTVL

SEQ ID NO: 1000 - protein, 120 aa, Artificial Sequence
  Synthetic peptide
EVQLLESGGGVVQPGRSLRLSCAASGFTFSSYAMSWVRQAPGKCLEWVSAISGSGGGTFYADSVEGRFTISRDNSKNTLYLQMNSLRAEDTAVYYCARHDYSNYPYFDYWGLGTLVTVSS

SEQ ID NO: 1001 - protein, 108 aa, Artificial Sequence
  Synthetic peptide
EIVLTQSPGTLSLSPGERATLSCRASQSVRSSYLAWYQQKPGQAPRLLIYGASSRATGIPDRFSGSGSGTDFTLTISRLEPEDFAVYSCQQYGDLPFTFGCGTKVEIK

SEQ ID NO: 1002 - protein, 243 aa, Artificial Sequence
  Synthetic peptide
EVQLLESGGGVVQPGRSLRLSCAASGFTFSSYAMSWVRQAPGKCLEWVSAISGSGGGTFYADSVEGRFTISRDNSKNTLYLQMNSLRAEDTAVYYCARHDYSNYPYFDYWGLGTLVTVSSGGGGSGGGGSGGGGSEIVLTQSPGTLSLSPGERATLSCRASQSVRSSYLAWYQQKPGQAPRLLIYGASSRATGIPDRFSGSGSGTDFTLTISRLEPEDFAVYSCQQYGDLPFTFGCGTKVEIK

SEQ ID NO: 1003 - protein, 498 aa, Artificial Sequence
  Synthetic peptide
EVQLLESGGGVVQPGRSLRLSCAASGFTFSSYAMSWVRQAPGKCLEWVSAISGSGGGTFYADSVEGRFTISRDNSKNTLYLQMNSLRAEDTAVYYCARHDYSNYPYFDYWGLGTLVTVSSGGGGSGGGGSGGGGSEIVLTQSPGTLSLSPGERATLSCRASQSVRSSYLAWYQQKPGQAPRLLIYGASSRATGIPDRFSGSGSGTDFTLTISRLEPEDFAVYSCQQYGDLPFTFGCGTKVEIKSGGGGSEVQLVESGGGLVQPGGSLKLSCAASGFTFNKYAMNWVRQAPGKGLEWVARIRSKYNNYATYYADSVKDRFTISRDDSKNTAYLQMNNLKTEDTAVYYCVRHGNFGNSYISYWAYWGQGTLVTVSSGGGGSGGGGSGGGGSQTVVTQEPSLTVSPGGTVTLTCGSSTGAVTSGNYPNWVQQKPGQAPRGLIGGTKFLAPGTPARFSGSLLGGKAALTLSGVQPEDEAEYYCVLWYSNRWVFGGGTKLTVL

SEQ ID NO: 1004 - protein, 120 aa, Artificial Sequence; identical to SEQ ID NO: 988
  Synthetic peptide

SEQ ID NO: 1005 - protein, 108 aa, Artificial Sequence
  Synthetic peptide
EIVLTQSPGTLSLSPGERATLSCRASQSVRSSYLAWYQQKPGQAPRLLIYGASSRATGIPDRFSGSGSGTDFTLTISRLEPEDFAVYYCQQYGDLPFTFGCGTKVDIK

SEQ ID NO: 1006 - protein, 243 aa, Artificial Sequence
  Synthetic peptide
EVQLLESGGGMVQPGGSLRLSCAASGFTFSSYAMSWVRQAPGKCLEWVSAISGSGGRTFYADSVEGRFTISRDNSKNTLYLQMNSLRAEDTAVYYCTKHDYSNYPYFDYWGQGTLVTVSSGGGGSGGGGSGGGGSEIVLTQSPGTLSLSPGERATLSCRASQSVRSSYLAWYQQKPGQAPRLLIYGASSRATGIPDRFSGSGSGTDFTLTISRLEPEDFAVYYCQQYGDLPFTFGCGTKVDIK

SEQ ID NO: 1007 - protein, 498 aa, Artificial Sequence
  Synthetic peptide
EVQLLESGGGMVQPGGSLRLSCAASGFTFSSYAMSWVRQAPGKCLEWVSAISGSGGRTFYADSVEGRFTISRDNSKNTLYLQMNSLRAEDTAVYYCTKHDYSNYPYFDYWGQGTLVTVSSGGGGSGGGGSGGGGSEIVLTQSPGTLSLSPGERATLSCRASQSVRSSYLAWYQQKPGQAPRLLIYGASSRATGIPDRFSGSGSGTDFTLTISRLEPEDFAVYYCQQYGDLPFTFGCGTKVDIKSGGGGSEVQLVESGGGLVQPGGSLKLSCAASGFTFNKYAMNWVRQAPGKGLEWVARIRSKYNNYATYYADSVKDRFTISRDDSKNTAYLQMNNLKTEDTAVYYCVRHGNFGNSYISYWAYWGQGTLVTVSSGGGGSGGGGSGGGGSQTVVTQEPSLTVSPGGTVTLTCGSSTGAVTSGNYPNWVQQKPGQAPRGLIGGTKFLAPGTPARFSGSLLGGKAALTLSGVQPEDEAEYYCVLWYSNRWVFGGGTKLTVL

SEQ ID NO: 1008 - protein, 120 aa, Artificial Sequence; identical to SEQ ID NO: 980
  Synthetic peptide

SEQ ID NO: 1009 - protein, 108 aa, Artificial Sequence
  Synthetic peptide
EIVLTQSPGTLSLSPGERATLSCRASQGVRSSYLAWYQQKPGQAPRLLIYGASSRATGIPDRFSGSGSGTDFTLTINRLEPEDFAVYYCQQYGSSPPTFGCGTKVDIK

SEQ ID NO: 1010 - protein, 243 aa, Artificial Sequence
  Synthetic peptide
EVQLLESGGGLVQPGGSLRLSCAASGFTFSTYAMSWVRQAPGKCLEWVSLISGSGGRTYYADSVKGRFTISRDNSKNTLYLQMNSLRAEDTAVYYCAKHDYSNYPYFDYWGQGTLVTVSSGGGGSGGGGSGGGGSEIVLTQSPGTLSLSPGERATLSCRASQGVRSSYLAWYQQKPGQAPRLLIYGASSRATGIPDRFSGSGSGTDFTLTINRLEPEDFAVYYCQQYGSSPPTFGCGTKVDIK

SEQ ID NO: 1011 - protein, 498 aa, Artificial Sequence
  Synthetic peptide
EVQLLESGGGLVQPGGSLRLSCAASGFTFSTYAMSWVRQAPGKCLEWVSLISGSGGRTYYADSVKGRFTISRDNSKNTLYLQMNSLRAEDTAVYYCAKHDYSNYPYFDYWGQGTLVTVSSGGGGSGGGGSGGGGSEIVLTQSPGTLSLSPGERATLSCRASQGVRSSYLAWYQQKPGQAPRLLIYGASSRATGIPDRFSGSGSGTDFTLTINRLEPEDFAVYYCQQYGSSPPTFGCGTKVDIKSGGGGSEVQLVESGGGLVQPGGSLKLSCAASGFTFNKYAMNWVRQAPGKGLEWVARIRSKYNNYATYYADSVKDRFTISRDDSKNTAYLQMNNLKTEDTAVYYCVRHGNFGNSYISYWAYWGQGTLVTVSSGGGGSGGGGSGGGGSQTVVTQEPSLTVSPGGTVTLTCGSSTGAVTSGNYPNWVQQKPGQAPRGLIGGTKFLAPGTPARFSGSLLGGKAALTLSGVQPEDEAEYYCVLWYSNRWVFGGGTKLTVL

SEQ ID NO: 1012 - protein, 120 aa, Artificial Sequence; identical to SEQ ID NO: 996
  Synthetic peptide

SEQ ID NO: 1013 - protein, 108 aa, Artificial Sequence
  Synthetic peptide
EIVLTQSPGTLSLSPGERATLSCRASQSVRSNYLAWYQQKPGQAPRLLIYGASSRATGIPDRFSGSGSGTDFTLTINRLEPEDFAVYYCQQYGSSPPTFGCGTKVDIK

SEQ ID NO: 1014 - protein, 243 aa, Artificial Sequence
  Synthetic peptide
EVQLLESGGGVVQPGRSLRLSCAASGFTFSSYAMSWVRQAPGKCLEWVSAISGSGGRTFYADSVEGRFTISRDNSKNTLYLQMNSLRAEDTAVYYCAKHDYSNYPYFDYWGQGTLVTVSSGGGGSGGGGSGGGGSEIVLTQSPGTLSLSPGERATLSCRASQSVRSNYLAWYQQKPGQAPRLLIYGASSRATGIPDRFSGSGSGTDFTLTINRLEPEDFAVYYCQQYGSSPPTFGCGTKVDIK

SEQ ID NO: 1015 - protein, 498 aa, Artificial Sequence
  Synthetic peptide
EVQLLESGGGVVQPGRSLRLSCAASGFTFSSYAMSWVRQAPGKCLEWVSAISGSGGRTFYADSVEGRFTISRDNSKNTLYLQMNSLRAEDTAVYYCAKHDYSNYPYFDYWGQGTLVTVSSGGGGSGGGGSGGGGSEIVLTQSPGTLSLSPGERATLSCRASQSVRSNYLAWYQQKPGQAPRLLIYGASSRATGIPDRFSGSGSGTDFTLTINRLEPEDFAVYYCQQYGSSPPTFGCGTKVDIKSGGGGSEVQLVESGGGLVQPGGSLKLSCAASGFTFNKYAMNWVRQAPGKGLEWVARIRSKYNNYATYYADSVKDRFTISRDDSKNTAYLQMNNLKTEDTAVYYCVRHGNFGNSYISYWAYWGQGTLVTVSSGGGGSGGGGSGGGGSQTVVTQEPSLTVSPGGTVTLTCGSSTGAVTSGNYPNWVQQKPGQAPRGLIGGTKFLAPGTPARFSGSLLGGKAALTLSGVQPEDEAEYYCVLWYSNRWVFGGGTKLTVL

SEQ ID NO: 1016 - protein, 120 aa, Artificial Sequence; identical to SEQ ID NO: 677
  Synthetic peptide

SEQ ID NO: 1017 - protein, 107 aa, Artificial Sequence; identical to SEQ ID NO: 678
  Synthetic peptide

SEQ ID NO: 1018 - protein, 242 aa, Artificial Sequence; identical to SEQ ID NO: 679
  Synthetic peptide

SEQ ID NO: 1019 - protein, 497 aa, Artificial Sequence; identical to SEQ ID NO: 680
  Synthetic peptide

SEQ ID NO: 1020 - protein, 120 aa, Artificial Sequence; identical to SEQ ID NO: 932
  Synthetic peptide

SEQ ID NO: 1021 - protein, 108 aa, Artificial Sequence
  Synthetic peptide
EIVLTQSPGTLSLSPGERATLSCRASQSVRSSYLAWYQQKPGQAPRLLIYGASSRATGIPDRFSGSGSGTDFTLTISRLEPEDFAVYFCQQYGSSPPTFGCGTRLEIK

SEQ ID NO: 1022 - protein, 243 aa, Artificial Sequence
  Synthetic peptide
EVQLLESGGGMVQPGGSLRLSCAASGFTFSSYAMSWVRQAPGKCLEWVSAISGSGGRTFYADSVEGRFTISRDNSKNTLYLQMNSLRAEDTAVYYCAKHDYSNYPYFDYWGQGTLVTVSSGGGGSGGGGSGGGGSEIVLTQSPGTLSLSPGERATLSCRASQSVRSSYLAWYQQKPGQAPRLLIYGASSRATGIPDRFSGSGSGTDFTLTISRLEPEDFAVYFCQQYGSSPPTFGCGTRLEIK

SEQ ID NO: 1023 - protein, 498 aa, Artificial Sequence
  Synthetic peptide
EVQLLESGGGMVQPGGSLRLSCAASGFTFSSYAMSWVRQAPGKCLEWVSAISGSGGRTFYADSVEGRFTISRDNSKNTLYLQMNSLRAEDTAVYYCAKHDYSNYPYFDYWGQGTLVTVSSGGGGSGGGGSGGGGSEIVLTQSPGTLSLSPGERATLSCRASQSVRSSYLAWYQQKPGQAPRLLIYGASSRATGIPDRFSGSGSGTDFTLTISRLEPEDFAVYFCQQYGSSPPTFGCGTRLEIKSGGGGSEVQLVESGGGLVQPGGSLKLSCAASGFTFNKYAMNWVRQAPGKGLEWVARIRSKYNNYATYYADSVKDRFTISRDDSKNTAYLQMNNLKTEDTAVYYCVRHGNFGNSYISYWAYWGQGTLVTVSSGGGGSGGGGSGGGGSQTVVTQEPSLTVSPGGTVTLTCGSSTGAVTSGNYPNWVQQKPGQAPRGLIGGTKFLAPGTPARFSGSLLGGKAALTLSGVQPEDEAEYYCVLWYSNRWVFGGGTKLTVL

SEQ ID NO: 1024 - protein, 120 aa, Artificial Sequence
  Synthetic peptide
EVQLLESGGGLVQPGGSLRLSCAASGFTFSIYAMSWVRQAPGKCLEWVSAIGDSGGSTFYADSVKGRFTISRDNSKNTLYLQMNSLRAEDTAVYYCAKHDYSNYPYFDYWGQGTLVTVSS

SEQ ID NO: 1025 - protein, 108 aa, Artificial Sequence
  Synthetic peptide
EIVLTQSPGTLSLSPGERATLSCRASQSVRSSYVAWYQQKPGQAPRLLIYGASSRATGIPDRFSGSGSGTDFTLTISRLEPEDFAVYYCQQYGDLPFTFGCGTRLEIK

SEQ ID NO: 1026 - protein, 243 aa, Artificial Sequence
  Synthetic peptide
EVQLLESGGGLVQPGGSLRLSCAASGFTFSIYAMSWVRQAPGKCLEWVSAIGDSGGSTFYADSVKGRFTISRDNSKNTLYLQMNSLRAEDTAVYYCAKHDYSNYPYFDYWGQGTLVTVSSGGGGSGGGGSGGGGSEIVLTQSPGTLSLSPGERATLSCRASQSVRSSYVAWYQQKPGQAPRLLIYGASSRATGIPDRFSGSGSGTDFTLTISRLEPEDFAVYYCQQYGDLPFTFGCGTRLEIK

SEQ ID NO: 1027 - protein, 498 aa, Artificial Sequence
  Synthetic peptide
EVQLLESGGGLVQPGGSLRLSCAASGFTFSIYAMSWVRQAPGKCLEWVSAIGDSGGSTFYADSVKGRFTISRDNSKNTLYLQMNSLRAEDTAVYYCAKHDYSNYPYFDYWGQGTLVTVSSGGGGSGGGGSGGGGSEIVLTQSPGTLSLSPGERATLSCRASQSVRSSYVAWYQQKPGQAPRLLIYGASSRATGIPDRFSGSGSGTDFTLTISRLEPEDFAVYYCQQYGDLPFTFGCGTRLEIKSGGGGSEVQLVESGGGLVQPGGSLKLSCAASGFTFNKYAMNWVRQAPGKGLEWVARIRSKYNNYATYYADSVKDRFTISRDDSKNTAYLQMNNLKTEDTAVYYCVRHGNFGNSYISYWAYWGQGTLVTVSSGGGGSGGGGSGGGGSQTVVTQEPSLTVSPGGTVTLTCGSSTGAVTSGNYPNWVQQKPGQAPRGLIGGTKFLAPGTPARFSGSLLGGKAALTLSGVQPEDEAEYYCVLWYSNRWVFGGGTKLTVL

SEQ ID NO: 1028 - protein, 125 aa, Artificial Sequence
  Synthetic peptide
QVQLQESGPGLVKPSQTLSLTCTVSGGSISSSSYYWGWIRQPPGKCLEWIGSIYHSGGTYFNPSLKSRVTISVDTSKNQFSLKLSSVTAADTAVYYCARHYEILTGYYPDVFDIWGQGTMVTVSS

SEQ ID NO: 1029 - protein, 107 aa, Artificial Sequence
  Synthetic peptide
DIQMTQSPSSLSASVGDRVTITCRASQSISSYLNWYQQKPGKAPKLLIYAASNLQSGVSSRFSGSGSGTDFTLTISSLQPEDFATYYCQQSFSSPRTFGCGTKVEIK

SEQ ID NO: 1030 - protein, 247 aa, Artificial Sequence
  Synthetic peptide
QVQLQESGPGLVKPSQTLSLTCTVSGGSISSSSYYWGWIRQPPGKCLEWIGSIYHSGGTYFNPSLKSRVTISVDTSKNQFSLKLSSVTAADTAVYYCARHYEILTGYYPDVFDIWGQGTMVTVSSGGGGSGGGGSGGGGSDIQMTQSPSSLSASVGDRVTITCRASQSISSYLNWYQQKPGKAPKLLIYAASNLQSGVSSRFSGSGSGTDFTLTISSLQPEDFATYYCQQSFSSPRTFGCGTKVEIK

SEQ ID NO: 1031 - protein, 502 aa, Artificial Sequence
  Synthetic peptide
QVQLQESGPGLVKPSQTLSLTCTVSGGSISSSSYYWGWIRQPPGKCLEWIGSIYHSGGTYFNPSLKSRVTISVDTSKNQFSLKLSSVTAADTAVYYCARHYEILTGYYPDVFDIWGQGTMVTVSSGGGGSGGGGSGGGGSDIQMTQSPSSLSASVGDRVTITCRASQSISSYLNWYQQKPGKAPKLLIYAASNLQSGVSSRFSGSGSGTDFTLTISSLQPEDFATYYCQQSFSSPRTFGCGTKVEIKSGGGGSEVQLVESGGGLVQPGGSLKLSCAASGFTFNKYAMNWVRQAPGKGLEWVARIRSKYNNYATYYADSVKDRFTISRDDSKNTAYLQMNNLKTEDTAVYYCVRHGNFGNSYISYWAYWGQGTLVTVSSGGGGSGGGGSGGGGSQTVVTQEPSLTVSPGGTVTLTCGSSTGAVTSGNYPNWVQQKPGQAPRGLIGGTKFLAPGTPARFSGSLLGGKAALTLSGVQPEDEAEYYCVLWYSNRWVFGGGTKLTVL

SEQ ID NO: 1032 - protein, 120 aa, Artificial Sequence; identical to SEQ ID NO: 727
  Synthetic peptide

SEQ ID NO: 1033 - protein, 107 aa, Artificial Sequence; identical to SEQ ID NO: 728
  Synthetic peptide

SEQ ID NO: 1034 - protein, 242 aa, Artificial Sequence; identical to SEQ ID NO: 729
  Synthetic peptide

SEQ ID NO: 1035 - protein, 497 aa, Artificial Sequence; identical to SEQ ID NO: 730
  Synthetic peptide

SEQ ID NO: 1036 - protein, 120 aa, Artificial Sequence; identical to SEQ ID NO: 637
  Synthetic peptide

SEQ ID NO: 1037 - protein, 108 aa, Artificial Sequence; identical to SEQ ID NO: 638
  Synthetic peptide

SEQ ID NO: 1038 - protein, 243 aa, Artificial Sequence; identical to SEQ ID NO: 639
  Synthetic peptide

SEQ ID NO: 1039 - protein, 498 aa, Artificial Sequence; identical to SEQ ID NO: 640
  Synthetic peptide

SEQ ID NO: 1040 - protein, 124 aa, Artificial Sequence; identical to SEQ ID NO: 697
  Synthetic peptide

SEQ ID NO: 1041 - protein, 107 aa, Artificial Sequence; identical to SEQ ID NO: 698
  Synthetic peptide

SEQ ID NO: 1042 - protein, 246 aa, Artificial Sequence; identical to SEQ ID NO: 699
  Synthetic peptide

SEQ ID NO: 1043 - protein, 501 aa, Artificial Sequence; identical to SEQ ID NO: 700
  Synthetic peptide

SEQ ID NO: 1044 - protein, 5 aa, Artificial Sequence
  Synthetic peptide
SYAMS

SEQ ID NO: 1045 - protein, 17 aa, Artificial Sequence
  Synthetic peptide
VISGSGGRPNYAESVKG

SEQ ID NO: 1046 - protein, 11 aa, Artificial Sequence
  Synthetic peptide
VDYSNYLFFDY

SEQ ID NO: 1047 - protein, 12 aa, Artificial Sequence
  Synthetic peptide
RAGQSVRSSYLG

SEQ ID NO: 1048 - protein, 7 aa, Artificial Sequence
  Synthetic peptide
GASSRAT

SEQ ID NO: 1049 - protein, 9 aa, Artificial Sequence
  Synthetic peptide
QQYGYSPPT

SEQ ID NO: 1050 - protein, 120 aa, Artificial Sequence
  Synthetic peptide
EVQLLESGGGLVQPGGSLRLSCAASGFTFSSYAMSWVRQAPGKCLEWVSVISGSGGRPNYAESVKGRFTISRDNSKNTLYLQMNSLRDEDTAVYYCAKVDYSNYLFFDYWGQGTLVTVSS

SEQ ID NO: 1051 - protein, 108 aa, Artificial Sequence; identical to SEQ ID NO: 921
  Synthetic peptide

SEQ ID NO: 1052 - protein, 243 aa, Artificial Sequence
  Synthetic peptide
EVQLLESGGGLVQPGGSLRLSCAASGFTFSSYAMSWVRQAPGKCLEWVSVISGSGGRPNYAESVKGRFTISRDNSKNTLYLQMNSLRDEDTAVYYCAKVDYSNYLFFDYWGQGTLVTVSSGGGGSGGGGSGGGGSEIVLTQSPGTLSLSPGEGATLSCRAGQSVRSSYLGWYQQKPGQAPRLLIYGASSRATGIPDRFSGSGSGTDFTLTISRLEPEDFAVYYCQQYGYSPPTFGCGTKLEIK

SEQ ID NO: 1053 - protein, 498 aa, Artificial Sequence
  Synthetic peptide
EVQLLESGGGLVQPGGSLRLSCAASGFTFSSYAMSWVRQAPGKCLEWVSVISGSGGRPNYAESVKGRFTISRDNSKNTLYLQMNSLRDEDTAVYYCAKVDYSNYLFFDYWGQGTLVTVSSGGGGSGGGGSGGGGSEIVLTQSPGTLSLSPGEGATLSCRAGQSVRSSYLGWYQQKPGQAPRLLIYGASSRATGIPDRFSGSGSGTDFTLTISRLEPEDFAVYYCQQYGYSPPTFGCGTKLEIKSGGGGSEVQLVESGGGLVQPGGSLKLSCAASGFTFNKYAMNWVRQAPGKGLEWVARIRSKYNNYATYYADSVKDRFTISRDDSKNTAYLQMNNLKTEDTAVYYCVRHGNFGNSYISYWAYWGQGTLVTVSSGGGGSGGGGSGGGGSQTVVTQEPSLTVSPGGTVTLTCGSSTGAVTSGNYPNWVQQKPGQAPRGLIGGTKFLAPGTPARFSGSLLGGKAALTLSGVQPEDEAEYYCVLWYSNRWVFGGGTKLTVL

SEQ ID NO: 1054 - protein, 120 aa, Artificial Sequence
  Synthetic peptide
EVQLLESGGGLVQPGGSLRLSCAASGFTFSSYAMSWVRQAPGKGLEWVSVISGSGGRPNYAESVKGRFTISRDNSKNTLYLQMNSLRDEDTAVYYCAKVDYSNYLFFDYWGQGTLVTVSS

SEQ ID NO: 1055 - protein, 108 aa, Artificial Sequence; identical to SEQ ID NO: 128
  Synthetic peptide

SEQ ID NO: 1056 - protein, 243 aa, Artificial Sequence
  Synthetic peptide
EVQLLESGGGLVQPGGSLRLSCAASGFTFSSYAMSWVRQAPGKGLEWVSVISGSGGRPNYAESVKGRFTISRDNSKNTLYLQMNSLRDEDTAVYYCAKVDYSNYLFFDYWGQGTLVTVSSGGGGSGGGGSGGGGSEIVLTQSPGTLSLSPGEGATLSCRAGQSVRSSYLGWYQQKPGQAPRLLIYGASSRATGIPDRFSGSGSGTDFTLTISRLEPEDFAVYYCQQYGYSPPTFGGGTKLEIK

SEQ ID NO: 1057 - protein, 498 aa, Artificial Sequence
  Synthetic peptide
EVQLLESGGGLVQPGGSLRLSCAASGFTFSSYAMSWVRQAPGKGLEWVSVISGSGGRPNYAESVKGRFTISRDNSKNTLYLQMNSLRDEDTAVYYCAKVDYSNYLFFDYWGQGTLVTVSSGGGGSGGGGSGGGGSEIVLTQSPGTLSLSPGEGATLSCRAGQSVRSSYLGWYQQKPGQAPRLLIYGASSRATGIPDRFSGSGSGTDFTLTISRLEPEDFAVYYCQQYGYSPPTFGGGTKLEIKSGGGGSEVQLVESGGGLVQPGGSLKLSCAASGFTFNKYAMNWVRQAPGKGLEWVARIRSKYNNYATYYADSVKDRFTISRDDSKNTAYLQMNNLKTEDTAVYYCVRHGNFGNSYISYWAYWGQGTLVTVSSGGGGSGGGGSGGGGSQTVVTQEPSLTVSPGGTVTLTCGSSTGAVTSGNYPNWVQQKPGQAPRGLIGGTKFLAPGTPARFSGSLLGGKAALTLSGVQPEDEAEYYCVLWYSNRWVFGGGTKLTVL

SEQ ID NO: 1058 - protein, 5 aa, Artificial Sequence
  Synthetic peptide
IYAMS

SEQ ID NO: 1059 - protein, 17 aa, Artificial Sequence
  Synthetic peptide
AISGSGGSTFYAESVKG

SEQ ID NO: 1060 - protein, 11 aa, Artificial Sequence
  Synthetic peptide
HDYSNYPYFDY

SEQ ID NO: 1061 - protein, 12 aa, Artificial Sequence
  Synthetic peptide
RASQSVRSSYLA

SEQ ID NO: 1062 - protein, 7 aa, Artificial Sequence
  Synthetic peptide
GASSRAT

SEQ ID NO: 1063 - protein, 9 aa, Artificial Sequence
  Synthetic peptide
QQYGDLPFT

SEQ ID NO: 1064 - protein, 120 aa, Artificial Sequence
  Synthetic peptide
EVQLLESGGGLVQPGGSLKLSCAASGFTFSIYAMSWVRQAPGKCLEWVSAISGSGGSTFYAESVKGRFTISRDNSKNTLYLQMNSLRAEDTAVYYCAKHDYSNYPYFDYWGQGTLVTVSS

SEQ ID NO: 1065 - protein, 108 aa, Artificial Sequence; identical to SEQ ID NO: 925
  Synthetic peptide

SEQ ID NO: 1066 - protein, 243 aa, Artificial Sequence
  Synthetic peptide
EVQLLESGGGLVQPGGSLKLSCAASGFTFSIYAMSWVRQAPGKCLEWVSAISGSGGSTFYAESVKGRFTISRDNSKNTLYLQMNSLRAEDTAVYYCAKHDYSNYPYFDYWGQGTLVTVSSGGGGSGGGGSGGGGSEIVLTQSPGTLSLSPGERATLSCRASQSVRSSYLAWYQQKPGQAPRLLIYGASSRATGIPDRFSGSGSGTDFTLTISRLEPEDFAVYYCQQYGDLPFTFGCGTKLEIK

SEQ ID NO: 1067 - protein, 498 aa, Artificial Sequence
  Synthetic peptide
EVQLLESGGGLVQPGGSLKLSCAASGFTFSIYAMSWVRQAPGKCLEWVSAISGSGGSTFYAESVKGRFTISRDNSKNTLYLQMNSLRAEDTAVYYCAKHDYSNYPYFDYWGQGTLVTVSSGGGGSGGGGSGGGGSEIVLTQSPGTLSLSPGERATLSCRASQSVRSSYLAWYQQKPGQAPRLLIYGASSRATGIPDRFSGSGSGTDFTLTISRLEPEDFAVYYCQQYGDLPFTFGCGTKLEIKSGGGGSEVQLVESGGGLVQPGGSLKLSCAASGFTFNKYAMNWVRQAPGKGLEWVARIRSKYNNYATYYADSVKDRFTISRDDSKNTAYLQMNNLKTEDTAVYYCVRHGNFGNSYISYWAYWGQGTLVTVSSGGGGSGGGGSGGGGSQTVVTQEPSLTVSPGGTVTLTCGSSTGAVTSGNYPNWVQQKPGQAPRGLIGGTKFLAPGTPARFSGSLLGGKAALTLSGVQPEDEAEYYCVLWYSNRWVFGGGTKLTVL

SEQ ID NO: 1068 - protein, 120 aa, Artificial Sequence
  Synthetic peptide
EVQLLESGGGLVQPGGSLKLSCAASGFTFSIYAMSWVRQAPGKGLEWVSAISGSGGSTFYAESVKGRFTISRDNSKNTLYLQMNSLRAEDTAVYYCAKHDYSNYPYFDYWGQGTLVTVSS

SEQ ID NO: 1069 - protein, 108 aa, Artificial Sequence; identical to SEQ ID NO: 138
  Synthetic peptide

SEQ ID NO: 1070 - protein, 243 aa, Artificial Sequence
  Synthetic peptide
EVQLLESGGGLVQPGGSLKLSCAASGFTFSIYAMSWVRQAPGKGLEWVSAISGSGGSTFYAESVKGRFTISRDNSKNTLYLQMNSLRAEDTAVYYCAKHDYSNYPYFDYWGQGTLVTVSSGGGGSGGGGSGGGGSEIVLTQSPGTLSLSPGERATLSCRASQSVRSSYLAWYQQKPGQAPRLLIYGASSRATGIPDRFSGSGSGTDFTLTISRLEPEDFAVYYCQQYGDLPFTFGPGTKLEIK

SEQ ID NO: 1071 - protein, 498 aa, Artificial Sequence
  Synthetic peptide
EVQLLESGGGLVQPGGSLKLSCAASGFTFSIYAMSWVRQAPGKGLEWVSAISGSGGSTFYAESVKGRFTISRDNSKNTLYLQMNSLRAEDTAVYYCAKHDYSNYPYFDYWGQGTLVTVSSGGGGSGGGGSGGGGSEIVLTQSPGTLSLSPGERATLSCRASQSVRSSYLAWYQQKPGQAPRLLIYGASSRATGIPDRFSGSGSGTDFTLTISRLEPEDFAVYYCQQYGDLPFTFGPGTKLEIKSGGGGSEVQLVESGGGLVQPGGSLKLSCAASGFTFNKYAMNWVRQAPGKGLEWVARIRSKYNNYATYYADSVKDRFTISRDDSKNTAYLQMNNLKTEDTAVYYCVRHGNFGNSYISYWAYWGQGTLVTVSSGGGGSGGGGSGGGGSQTVVTQEPSLTVSPGGTVTLTCGSSTGAVTSGNYPNWVQQKPGQAPRGLIGGTKFLAPGTPARFSGSLLGGKAALTLSGVQPEDEAEYYCVLWYSNRWVFGGGTKLTVL

SEQ ID NO: 1072 - protein, 5 aa, Artificial Sequence
  Synthetic peptide
SYAMS

SEQ ID NO: 1073 - protein, 17 aa, Artificial Sequence
  Synthetic peptide
AISGSGGRTFYAESVEG

SEQ ID NO: 1074 - protein, 11 aa, Artificial Sequence
  Synthetic peptide
HDYSNYPYFDY

SEQ ID NO: 1075 - protein, 12 aa, Artificial Sequence
  Synthetic peptide
RASQSVRSSYLA

SEQ ID NO: 1076 - protein, 7 aa, Artificial Sequence
  Synthetic peptide
GASSRAT

SEQ ID NO: 1077 - protein, 9 aa, Artificial Sequence
  Synthetic peptide
QQYGSSPFT

SEQ ID NO: 1078 - protein, 120 aa, Artificial Sequence
  Synthetic peptide
EVQLLESGGGMVQPGGSLRLSCAASGFTFSSYAMSWVRQAPGKCLEWVSAISGSGGRTFYAESVEGRFTISRDNSKNTLFLQMNSLRAEDTAVYYCAKHDYSNYPYFDYWGQGTLVTVSS

SEQ ID NO: 1079 - protein, 108 aa, Artificial Sequence; identical to SEQ ID NO: 929
  Synthetic peptide

SEQ ID NO: 1080 - protein, 243 aa, Artificial Sequence
  Synthetic peptide
EVQLLESGGGMVQPGGSLRLSCAASGFTFSSYAMSWVRQAPGKCLEWVSAISGSGGRTFYAESVEGRFTISRDNSKNTLFLQMNSLRAEDTAVYYCAKHDYSNYPYFDYWGQGTLVTVSSGGGGSGGGGSGGGGSEIVLTQSPGTLSLSPGERATLSCRASQSVRSSYLAWYQQKPGQAPRLLIYGASSRATGIPDRFSGSGSGTDFTLTISRLEPEDFAVYYCQQYGSSPFTFGCGTKLEIK

SEQ ID NO: 1081 - protein, 498 aa, Artificial Sequence
  Synthetic peptide
EVQLLESGGGMVQPGGSLRLSCAASGFTFSSYAMSWVRQAPGKCLEWVSAISGSGGRTFYAESVEGRFTISRDNSKNTLFLQMNSLRAEDTAVYYCAKHDYSNYPYFDYWGQGTLVTVSSGGGGSGGGGSGGGGSEIVLTQSPGTLSLSPGERATLSCRASQSVRSSYLAWYQQKPGQAPRLLIYGASSRATGIPDRFSGSGSGTDFTLTISRLEPEDFAVYYCQQYGSSPFTFGCGTKLEIKSGGGGSEVQLVESGGGLVQPGGSLKLSCAASGFTFNKYAMNWVRQAPGKGLEWVARIRSKYNNYATYYADSVKDRFTISRDDSKNTAYLQMNNLKTEDTAVYYCVRHGNFGNSYISYWAYWGQGTLVTVSSGGGGSGGGGSGGGGSQTVVTQEPSLTVSPGGTVTLTCGSSTGAVTSGNYPNWVQQKPGQAPRGLIGGTKFLAPGTPARFSGSLLGGKAALTLSGVQPEDEAEYYCVLWYSNRWVFGGGTKLTVL

SEQ ID NO: 1082 - protein, 120 aa, Artificial Sequence
  Synthetic peptide
EVQLLESGGGMVQPGGSLRLSCAASGFTFSSYAMSWVRQAPGKGLEWVSAISGSGGRTFYAESVEGRFTISRDNSKNTLFLQMNSLRAEDTAVYYCAKHDYSNYPYFDYWGQGTLVTVSS

SEQ ID NO: 1083 - protein, 108 aa, Artificial Sequence; identical to SEQ ID NO: 148
  Synthetic peptide

SEQ ID NO: 1084 - protein, 243 aa, Artificial Sequence
  Synthetic peptide
EVQLLESGGGMVQPGGSLRLSCAASGFTFSSYAMSWVRQAPGKGLEWVSAISGSGGRTFYAESVEGRFTISRDNSKNTLFLQMNSLRAEDTAVYYCAKHDYSNYPYFDYWGQGTLVTVSSGGGGSGGGGSGGGGSEIVLTQSPGTLSLSPGERATLSCRASQSVRSSYLAWYQQKPGQAPRLLIYGASSRATGIPDRFSGSGSGTDFTLTISRLEPEDFAVYYCQQYGSSPFTFGPGTKLEIK

SEQ ID NO: 1085 - protein, 498 aa, Artificial Sequence
  Synthetic peptide
EVQLLESGGGMVQPGGSLRLSCAASGFTFSSYAMSWVRQAPGKGLEWVSAISGSGGRTFYAESVEGRFTISRDNSKNTLFLQMNSLRAEDTAVYYCAKHDYSNYPYFDYWGQGTLVTVSSGGGGSGGGGSGGGGSEIVLTQSPGTLSLSPGERATLSCRASQSVRSSYLAWYQQKPGQAPRLLIYGASSRATGIPDRFSGSGSGTDFTLTISRLEPEDFAVYYCQQYGSSPFTFGPGTKLEIKSGGGGSEVQLVESGGGLVQPGGSLKLSCAASGFTFNKYAMNWVRQAPGKGLEWVARIRSKYNNYATYYADSVKDRFTISRDDSKNTAYLQMNNLKTEDTAVYYCVRHGNFGNSYISYWAYWGQGTLVTVSSGGGGSGGGGSGGGGSQTVVTQEPSLTVSPGGTVTLTCGSSTGAVTSGNYPNWVQQKPGQAPRGLIGGTKFLAPGTPARFSGSLLGGKAALTLSGVQPEDEAEYYCVLWYSNRWVFGGGTKLTVL

SEQ ID NO: 1086 - protein, 5 aa, Artificial Sequence
  Synthetic peptide
SYAMS

SEQ ID NO: 1087 - protein, 17 aa, Artificial Sequence
  Synthetic peptide
AISGSGGRTFYAESVEG

SEQ ID NO: 1088 - protein, 11 aa, Artificial Sequence
  Synthetic peptide
HDYSNYPYFDY

SEQ ID NO: 1089 - protein, 12 aa, Artificial Sequence
  Synthetic peptide
RASQSIRSSYLA

SEQ ID NO: 1090 - protein, 7 aa, Artificial Sequence
  Synthetic peptide
GASSRAT

SEQ ID NO: 1091 - protein, 9 aa, Artificial Sequence
  Synthetic peptide
QQYGDLPFT

SEQ ID NO: 1092 - protein, 120 aa, Artificial Sequence
  Synthetic peptide
EVQLLESGGGMVQPGGSLRLSCAASGFTFSSYAMSWVRQAPGKCLEWVSAISGSGGRTFYAESVEGRFTISRDNSKNTLYLQMNSLRAEDTAVYYCAKHDYSNYPYFDYWGQGTLVTVSS

SEQ ID NO: 1093 - protein, 108 aa, Artificial Sequence; identical to SEQ ID NO: 933
  Synthetic peptide

SEQ ID NO: 1094 - protein, 243 aa, Artificial Sequence
  Synthetic peptide
EVQLLESGGGMVQPGGSLRLSCAASGFTFSSYAMSWVRQAPGKCLEWVSAISGSGGRTFYAESVEGRFTISRDNSKNTLYLQMNSLRAEDTAVYYCAKHDYSNYPYFDYWGQGTLVTVSSGGGGSGGGGSGGGGSEIVLTQSPGTLSLSPGERATLSCRASQSIRSSYLAWYQQKPGQAPRLLIYGASSRATGIPDRFSGSGSGTDFTLTISRLEPEDFAVYYCQQYGDLPFTFGCGTKLEIK

SEQ ID NO: 1095 - protein, 498 aa, Artificial Sequence
  Synthetic peptide
EVQLLESGGGMVQPGGSLRLSCAASGFTFSSYAMSWVRQAPGKCLEWVSAISGSGGRTFYAESVEGRFTISRDNSKNTLYLQMNSLRAEDTAVYYCAKHDYSNYPYFDYWGQGTLVTVSSGGGGSGGGGSGGGGSEIVLTQSPGTLSLSPGERATLSCRASQSIRSSYLAWYQQKPGQAPRLLIYGASSRATGIPDRFSGSGSGTDFTLTISRLEPEDFAVYYCQQYGDLPFTFGCGTKLEIKSGGGGSEVQLVESGGGLVQPGGSLKLSCAASGFTFNKYAMNWVRQAPGKGLEWVARIRSKYNNYATYYADSVKDRFTISRDDSKNTAYLQMNNLKTEDTAVYYCVRHGNFGNSYISYWAYWGQGTLVTVSSGGGGSGGGGSGGGGSQTVVTQEPSLTVSPGGTVTLTCGSSTGAVTSGNYPNWVQQKPGQAPRGLIGGTKFLAPGTPARFSGSLLGGKAALTLSGVQPEDEAEYYCVLWYSNRWVFGGGTKLTVL

SEQ ID NO: 1096 - protein, 120 aa, Artificial Sequence
  Synthetic peptide
EVQLLESGGGMVQPGGSLRLSCAASGFTFSSYAMSWVRQAPGKGLEWVSAISGSGGRTFYAESVEGRFTISRDNSKNTLYLQMNSLRAEDTAVYYCAKHDYSNYPYFDYWGQGTLVTVSS

SEQ ID NO: 1097 - protein, 108 aa, Artificial Sequence; identical to SEQ ID NO: 158
  Synthetic peptide

SEQ ID NO: 1098 - protein, 243 aa, Artificial Sequence
  Synthetic peptide
EVQLLESGGGMVQPGGSLRLSCAASGFTFSSYAMSWVRQAPGKGLEWVSAISGSGGRTFYAESVEGRFTISRDNSKNTLYLQMNSLRAEDTAVYYCAKHDYSNYPYFDYWGQGTLVTVSSGGGGSGGGGSGGGGSEIVLTQSPGTLSLSPGERATLSCRASQSIRSSYLAWYQQKPGQAPRLLIYGASSRATGIPDRFSGSGSGTDFTLTISRLEPEDFAVYYCQQYGDLPFTFGPGTKLEIK

SEQ ID NO: 1099 - protein, 498 aa, Artificial Sequence
  Synthetic peptide
EVQLLESGGGMVQPGGSLRLSCAASGFTFSSYAMSWVRQAPGKGLEWVSAISGSGGRTFYAESVEGRFTISRDNSKNTLYLQMNSLRAEDTAVYYCAKHDYSNYPYFDYWGQGTLVTVSSGGGGSGGGGSGGGGSEIVLTQSPGTLSLSPGERATLSCRASQSIRSSYLAWYQQKPGQAPRLLIYGASSRATGIPDRFSGSGSGTDFTLTISRLEPEDFAVYYCQQYGDLPFTFGPGTKLEIKSGGGGSEVQLVESGGGLVQPGGSLKLSCAASGFTFNKYAMNWVRQAPGKGLEWVARIRSKYNNYATYYADSVKDRFTISRDDSKNTAYLQMNNLKTEDTAVYYCVRHGNFGNSYISYWAYWGQGTLVTVSSGGGGSGGGGSGGGGSQTVVTQEPSLTVSPGGTVTLTCGSSTGAVTSGNYPNWVQQKPGQAPRGLIGGTKFLAPGTPARFSGSLLGGKAALTLSGVQPEDEAEYYCVLWYSNRWVFGGGTKLTVL

SEQ ID NO: 1100 - protein, 5 aa, Artificial Sequence
  Synthetic peptide
SYAMS

SEQ ID NO: 1101 - protein, 17 aa, Artificial Sequence
  Synthetic peptide
AISGSGGRTHYAESVKG

SEQ ID NO: 1102 - protein, 11 aa, Artificial Sequence
  Synthetic peptide
HDYSNYPYFDY

SEQ ID NO: 1103 - protein, 12 aa, Artificial Sequence
  Synthetic peptide
RASQSVRSSYLA

SEQ ID NO: 1104 - protein, 7 aa, Artificial Sequence
  Synthetic peptide
GASSRAT

SEQ ID NO: 1105 - protein, 9 aa, Artificial Sequence
  Synthetic peptide
QQYGSSPFT

SEQ ID NO: 1106 - protein, 120 aa, Artificial Sequence
  Synthetic peptide
EVQLLESGGGLVQSGGSLRLSCAASGFTFSSYAMSWVRQAPGKCLEWVSAISGSGGRTHYAESVKGRFTISRDNSKNTLYLQMNSLRAEDTAVYYCAKHDYSNYPYFDYWGQGTLVTVSS

SEQ ID NO: 1107 - protein, 108 aa, Artificial Sequence; identical to SEQ ID NO: 929
  Synthetic peptide

SEQ ID NO: 1108 - protein, 243 aa, Artificial Sequence
  Synthetic peptide
EVQLLESGGGLVQSGGSLRLSCAASGFTFSSYAMSWVRQAPGKCLEWVSAISGSGGRTHYAESVKGRFTISRDNSKNTLYLQMNSLRAEDTAVYYCAKHDYSNYPYFDYWGQGTLVTVSSGGGGSGGGGSGGGGSEIVLTQSPGTLSLSPGERATLSCRASQSVRSSYLAWYQQKPGQAPRLLIYGASSRATGIPDRFSGSGSGTDFTLTISRLEPEDFAVYYCQQYGSSPFTFGCGTKLEIK

SEQ ID NO: 1109 - protein, 498 aa, Artificial Sequence
  Synthetic peptide
EVQLLESGGGLVQSGGSLRLSCAASGFTFSSYAMSWVRQAPGKCLEWVSAISGSGGRTHYAESVKGRFTISRDNSKNTLYLQMNSLRAEDTAVYYCAKHDYSNYPYFDYWGQGTLVTVSSGGGGSGGGGSGGGGSEIVLTQSPGTLSLSPGERATLSCRASQSVRSSYLAWYQQKPGQAPRLLIYGASSRATGIPDRFSGSGSGTDFTLTISRLEPEDFAVYYCQQYGSSPFTFGCGTKLEIKSGGGGSEVQLVESGGGLVQPGGSLKLSCAASGFTFNKYAMNWVRQAPGKGLEWVARIRSKYNNYATYYADSVKDRFTISRDDSKNTAYLQMNNLKTEDTAVYYCVRHGNFGNSYISYWAYWGQGTLVTVSSGGGGSGGGGSGGGGSQTVVTQEPSLTVSPGGTVTLTCGSSTGAVTSGNYPNWVQQKPGQAPRGLIGGTKFLAPGTPARFSGSLLGGKAALTLSGVQPEDEAEYYCVLWYSNRWVFGGGTKLTVL

SEQ ID NO: 1110 - protein, 120 aa, Artificial Sequence
  Synthetic peptide
EVQLLESGGGLVQSGGSLRLSCAASGFTFSSYAMSWVRQAPGKGLEWVSAISGSGGRTHYAESVKGRFTISRDNSKNTLYLQMNSLRAEDTAVYYCAKHDYSNYPYFDYWGQGTLVTVSS

SEQ ID NO: 1111 - protein, 108 aa, Artificial Sequence; identical to SEQ ID NO: 148
  Synthetic peptide

SEQ ID NO: 1112 - protein, 243 aa, Artificial Sequence
  Synthetic peptide
EVQLLESGGGLVQSGGSLRLSCAASGFTFSSYAMSWVRQAPGKGLEWVSAISGSGGRTHYAESVKGRFTISRDNSKNTLYLQMNSLRAEDTAVYYCAKHDYSNYPYFDYWGQGTLVTVSSGGGGSGGGGSGGGGSEIVLTQSPGTLSLSPGERATLSCRASQSVRSSYLAWYQQKPGQAPRLLIYGASSRATGIPDRFSGSGSGTDFTLTISRLEPEDFAVYYCQQYGSSPFTFGPGTKLEIK

SEQ ID NO: 1113 - protein, 498 aa, Artificial Sequence
  Synthetic peptide
EVQLLESGGGLVQSGGSLRLSCAASGFTFSSYAMSWVRQAPGKGLEWVSAISGSGGRTHYAESVKGRFTISRDNSKNTLYLQMNSLRAEDTAVYYCAKHDYSNYPYFDYWGQGTLVTVSSGGGGSGGGGSGGGGSEIVLTQSPGTLSLSPGERATLSCRASQSVRSSYLAWYQQKPGQAPRLLIYGASSRATGIPDRFSGSGSGTDFTLTISRLEPEDFAVYYCQQYGSSPFTFGPGTKLEIKSGGGGSEVQLVESGGGLVQPGGSLKLSCAASGFTFNKYAMNWVRQAPGKGLEWVARIRSKYNNYATYYADSVKDRFTISRDDSKNTAYLQMNNLKTEDTAVYYCVRHGNFGNSYISYWAYWGQGTLVTVSSGGGGSGGGGSGGGGSQTVVTQEPSLTVSPGGTVTLTCGSSTGAVTSGNYPNWVQQKPGQAPRGLIGGTKFLAPGTPARFSGSLLGGKAALTLSGVQPEDEAEYYCVLWYSNRWVFGGGTKLTVL

SEQ ID NO: 1114 - protein, 5 aa, Artificial Sequence
  Synthetic peptide
SYAMS

SEQ ID NO: 1115 - protein, 17 aa, Artificial Sequence
  Synthetic peptide
LISGSGGRTHYAESVKG

SEQ ID NO: 1116 - protein, 11 aa, Artificial Sequence
  Synthetic peptide
HDYSNYPYFDY

SEQ ID NO: 1117 - protein, 12 aa, Artificial Sequence
  Synthetic peptide
RASQSVRSTYLA

SEQ ID NO: 1118 - protein, 7 aa, Artificial Sequence
  Synthetic peptide
DASSRAT

SEQ ID NO: 1119 - protein, 9 aa, Artificial Sequence
  Synthetic peptide
QQYGSSPPT

SEQ ID NO: 1120 - protein, 120 aa, Artificial Sequence
  Synthetic peptide
EVQLLESGGGLVQPGGSLRLSCAASGFTFSSYAMSWVRQAPGKCLEWVSLISGSGGRTHYAESVKGRFTISRDNSKNTLYLQMNSLRAEDTAVYYCAKHDYSNYPYFDYWGQGTLVTVSS

SEQ ID NO: 1121 - protein, 108 aa, Artificial Sequence; identical to SEQ ID NO: 941
  Synthetic peptide

SEQ ID NO: 1122 - protein, 243 aa, Artificial Sequence
  Synthetic peptide
EVQLLESGGGLVQPGGSLRLSCAASGFTFSSYAMSWVRQAPGKCLEWVSLISGSGGRTHYAESVKGRFTISRDNSKNTLYLQMNSLRAEDTAVYYCAKHDYSNYPYFDYWGQGTLVTVSSGGGGSGGGGSGGGGSEIVLTQSPGTLSLSPGERATLSCRASQSVRSTYLAWYQQKPGQAPRLLIYDASSRATGIPDRFSGSGSGTDFTLTISRLEPEDFAVYFCQQYGSSPPTFGCGTKLEIK

SEQ ID NO: 1123 - protein, 498 aa, Artificial Sequence
  Synthetic peptide
EVQLLESGGGLVQPGGSLRLSCAASGFTFSSYAMSWVRQAPGKCLEWVSLISGSGGRTHYAESVKGRFTISRDNSKNTLYLQMNSLRAEDTAVYYCAKHDYSNYPYFDYWGQGTLVTVSSGGGGSGGGGSGGGGSEIVLTQSPGTLSLSPGERATLSCRASQSVRSTYLAWYQQKPGQAPRLLIYDASSRATGIPDRFSGSGSGTDFTLTISRLEPEDFAVYFCQQYGSSPPTFGCGTKLEIKSGGGGSEVQLVESGGGLVQPGGSLKLSCAASGFTFNKYAMNWVRQAPGKGLEWVARIRSKYNNYATYYADSVKDRFTISRDDSKNTAYLQMNNLKTEDTAVYYCVRHGNFGNSYISYWAYWGQGTLVTVSSGGGGSGGGGSGGGGSQTVVTQEPSLTVSPGGTVTLTCGSSTGAVTSGNYPNWVQQKPGQAPRGLIGGTKFLAPGTPARFSGSLLGGKAALTLSGVQPEDEAEYYCVLWYSNRWVFGGGTKLTVL

SEQ ID NO: 1124 - protein, 120 aa, Artificial Sequence
  Synthetic peptide
EVQLLESGGGLVQPGGSLRLSCAASGFTFSSYAMSWVRQAPGKGLEWVSLISGSGGRTHYAESVKGRFTISRDNSKNTLYLQMNSLRAEDTAVYYCAKHDYSNYPYFDYWGQGTLVTVSS

SEQ ID NO: 1125 - protein, 108 aa, Artificial Sequence; identical to SEQ ID NO: 178
  Synthetic peptide

SEQ ID NO: 1126 - protein, 243 aa, Artificial Sequence
  Synthetic peptide
EVQLLESGGGLVQPGGSLRLSCAASGFTFSSYAMSWVRQAPGKGLEWVSLISGSGGRTHYAESVKGRFTISRDNSKNTLYLQMNSLRAEDTAVYYCAKHDYSNYPYFDYWGQGTLVTVSSGGGGSGGGGSGGGGSEIVLTQSPGTLSLSPGERATLSCRASQSVRSTYLAWYQQKPGQAPRLLIYDASSRATGIPDRFSGSGSGTDFTLTISRLEPEDFAVYFCQQYGSSPPTFGGGTKLEIK

SEQ ID NO: 1127 - protein, 498 aa, Artificial Sequence
  Synthetic peptide
EVQLLESGGGLVQPGGSLRLSCAASGFTFSSYAMSWVRQAPGKGLEWVSLISGSGGRTHYAESVKGRFTISRDNSKNTLYLQMNSLRAEDTAVYYCAKHDYSNYPYFDYWGQGTLVTVSSGGGGSGGGGSGGGGSEIVLTQSPGTLSLSPGERATLSCRASQSVRSTYLAWYQQKPGQAPRLLIYDASSRATGIPDRFSGSGSGTDFTLTISRLEPEDFAVYFCQQYGSSPPTFGGGTKLEIKSGGGGSEVQLVESGGGLVQPGGSLKLSCAASGFTFNKYAMNWVRQAPGKGLEWVARIRSKYNNYATYYADSVKDRFTISRDDSKNTAYLQMNNLKTEDTAVYYCVRHGNFGNSYISYWAYWGQGTLVTVSSGGGGSGGGGSGGGGSQTVVTQEPSLTVSPGGTVTLTCGSSTGAVTSGNYPNWVQQKPGQAPRGLIGGTKFLAPGTPARFSGSLLGGKAALTLSGVQPEDEAEYYCVLWYSNRWVFGGGTKLTVL

SEQ ID NO: 1128 - protein, 5 aa, Artificial Sequence
  Synthetic peptide
TYAMS

SEQ ID NO: 1129 - protein, 17 aa, Artificial Sequence
  Synthetic peptide
AISGSGGSTFYAESVKG

SEQ ID NO: 1130 - protein, 11 aa, Artificial Sequence
  Synthetic peptide
HDYSNYPYFDY

SEQ ID NO: 1131 - protein, 12 aa, Artificial Sequence
  Synthetic peptide
RASQSVRSSYLA

SEQ ID NO: 1132 - protein, 7 aa, Artificial Sequence
  Synthetic peptide
GASSRAT

SEQ ID NO: 1133 - protein, 9 aa, Artificial Sequence
  Synthetic peptide
QQYGDLPFT

SEQ ID NO: 1134 - protein, 120 aa, Artificial Sequence
  Synthetic peptide
EVQLLESGGGLVQPGGSLRLSCAASGFTFSTYAMSWVRQAPGKCLEWVSAISGSGGSTFYAESVKGRFTISRDNSKNTLSLQMNSLRAEDTAVYYCAKHDYSNYPYFDYWGQGTLVTVSS

SEQ ID NO: 1135 - protein, 108 aa, Artificial Sequence; identical to SEQ ID NO: 925
  Synthetic peptide

SEQ ID NO: 1136 - protein, 243 aa, Artificial Sequence
  Synthetic peptide
EVQLLESGGGLVQPGGSLRLSCAASGFTFSTYAMSWVRQAPGKCLEWVSAISGSGGSTFYAESVKGRFTISRDNSKNTLSLQMNSLRAEDTAVYYCAKHDYSNYPYFDYWGQGTLVTVSSGGGGSGGGGSGGGGSEIVLTQSPGTLSLSPGERATLSCRASQSVRSSYLAWYQQKPGQAPRLLIYGASSRATGIPDRFSGSGSGTDFTLTISRLEPEDFAVYYCQQYGDLPFTFGCGTKLEIK

SEQ ID NO: 1137 - protein, 498 aa, Artificial Sequence
  Synthetic peptide
EVQLLESGGGLVQPGGSLRLSCAASGFTFSTYAMSWVRQAPGKCLEWVSAISGSGGSTFYAESVKGRFTISRDNSKNTLSLQMNSLRAEDTAVYYCAKHDYSNYPYFDYWGQGTLVTVSSGGGGSGGGGSGGGGSEIVLTQSPGTLSLSPGERATLSCRASQSVRSSYLAWYQQKPGQAPRLLIYGASSRATGIPDRFSGSGSGTDFTLTISRLEPEDFAVYYCQQYGDLPFTFGCGTKLEIKSGGGGSEVQLVESGGGLVQPGGSLKLSCAASGFTFNKYAMNWVRQAPGKGLEWVARIRSKYNNYATYYADSVKDRFTISRDDSKNTAYLQMNNLKTEDTAVYYCVRHGNFGNSYISYWAYWGQGTLVTVSSGGGGSGGGGSGGGGSQTVVTQEPSLTVSPGGTVTLTCGSSTGAVTSGNYPNWVQQKPGQAPRGLIGGTKFLAPGTPARFSGSLLGGKAALTLSGVQPEDEAEYYCVLWYSNRWVFGGGTKLTVL

SEQ ID NO: 1138 - protein, 120 aa, Artificial Sequence
  Synthetic peptide
EVQLLESGGGLVQPGGSLRLSCAASGFTFSTYAMSWVRQAPGKGLEWVSAISGSGGSTFYAESVKGRFTISRDNSKNTLSLQMNSLRAEDTAVYYCAKHDYSNYPYFDYWGQGTLVTVSS

SEQ ID NO: 1139 - protein, 108 aa, Artificial Sequence; identical to SEQ ID NO: 138
  Synthetic peptide

SEQ ID NO: 1140 - protein, 243 aa, Artificial Sequence
  Synthetic peptide
EVQLLESGGGLVQPGGSLRLSCAASGFTFSTYAMSWVRQAPGKGLEWVSAISGSGGSTFYAESVKGRFTISRDNSKNTLSLQMNSLRAEDTAVYYCAKHDYSNYPYFDYWGQGTLVTVSSGGGGSGGGGSGGGGSEIVLTQSPGTLSLSPGERATLSCRASQSVRSSYLAWYQQKPGQAPRLLIYGASSRATGIPDRFSGSGSGTDFTLTISRLEPEDFAVYYCQQYGDLPFTFGPGTKLEIK

SEQ ID NO: 1141 - protein, 498 aa, Artificial Sequence
  Synthetic peptide
EVQLLESGGGLVQPGGSLRLSCAASGFTFSTYAMSWVRQAPGKGLEWVSAISGSGGSTFYAESVKGRFTISRDNSKNTLSLQMNSLRAEDTAVYYCAKHDYSNYPYFDYWGQGTLVTVSSGGGGSGGGGSGGGGSEIVLTQSPGTLSLSPGERATLSCRASQSVRSSYLAWYQQKPGQAPRLLIYGASSRATGIPDRFSGSGSGTDFTLTISRLEPEDFAVYYCQQYGDLPFTFGPGTKLEIKSGGGGSEVQLVESGGGLVQPGGSLKLSCAASGFTFNKYAMNWVRQAPGKGLEWVARIRSKYNNYATYYADSVKDRFTISRDDSKNTAYLQMNNLKTEDTAVYYCVRHGNFGNSYISYWAYWGQGTLVTVSSGGGGSGGGGSGGGGSQTVVTQEPSLTVSPGGTVTLTCGSSTGAVTSGNYPNWVQQKPGQAPRGLIGGTKFLAPGTPARFSGSLLGGKAALTLSGVQPEDEAEYYCVLWYSNRWVFGGGTKLTVL

SEQ ID NO: 1142 - protein, 5 aa, Artificial Sequence
  Synthetic peptide
TYAMS

SEQ ID NO: 1143 - protein, 17 aa, Artificial Sequence
  Synthetic peptide
AISGSGGRTFYAESVEG

SEQ ID NO: 1144 - protein, 11 aa, Artificial Sequence
  Synthetic peptide
HDYSNYPYFDY

SEQ ID NO: 1145 - protein, 12 aa, Artificial Sequence
  Synthetic peptide
RASQSVRSTYLA

SEQ ID NO: 1146 - protein, 7 aa, Artificial Sequence
  Synthetic peptide
GASSRAT

SEQ ID NO: 1147 - protein, 9 aa, Artificial Sequence
  Synthetic peptide
QQYGDLPFT

SEQ ID NO: 1148 - protein, 120 aa, Artificial Sequence
  Synthetic peptide
EVQLLESGGGMVQPGGSLRLSCAASGFTFSTYAMSWVRQAPGKCLEWVSAISGSGGRTFYAESVEGRFTISRDNSKNTLYLQMNSLRAEDTAVYYCAKHDYSNYPYFDYWGQGTLVTVSS

SEQ ID NO: 1149 - protein, 108 aa, Artificial Sequence; identical to SEQ ID NO: 949
  Synthetic peptide

SEQ ID NO: 1150 - protein, 243 aa, Artificial Sequence
  Synthetic peptide
EVQLLESGGGMVQPGGSLRLSCAASGFTFSTYAMSWVRQAPGKCLEWVSAISGSGGRTFYAESVEGRFTISRDNSKNTLYLQMNSLRAEDTAVYYCAKHDYSNYPYFDYWGQGTLVTVSSGGGGSGGGGSGGGGSEIVLTQSPGTLSLSPGERATLSCRASQSVRSTYLAWYQQKPGQAPRLLIYGASSRATGIPDRFSGSGSGTDFTLTISRLEPEDFAVYSCQQYGDLPFTFGCGTKLEIK

SEQ ID NO: 1151 - protein, 498 aa, Artificial Sequence
  Synthetic peptide
EVQLLESGGGMVQPGGSLRLSCAASGFTFSTYAMSWVRQAPGKCLEWVSAISGSGGRTFYAESVEGRFTISRDNSKNTLYLQMNSLRAEDTAVYYCAKHDYSNYPYFDYWGQGTLVTVSSGGGGSGGGGSGGGGSEIVLTQSPGTLSLSPGERATLSCRASQSVRSTYLAWYQQKPGQAPRLLIYGASSRATGIPDRFSGSGSGTDFTLTISRLEPEDFAVYSCQQYGDLPFTFGCGTKLEIKSGGGGSEVQLVESGGGLVQPGGSLKLSCAASGFTFNKYAMNWVRQAPGKGLEWVARIRSKYNNYATYYADSVKDRFTISRDDSKNTAYLQMNNLKTEDTAVYYCVRHGNFGNSYISYWAYWGQGTLVTVSSGGGGSGGGGSGGGGSQTVVTQEPSLTVSPGGTVTLTCGSSTGAVTSGNYPNWVQQKPGQAPRGLIGGTKFLAPGTPARFSGSLLGGKAALTLSGVQPEDEAEYYCVLWYSNRWVFGGGTKLTVL

SEQ ID NO: 1152 - protein, 120 aa, Artificial Sequence
  Synthetic peptide
EVQLLESGGGMVQPGGSLRLSCAASGFTFSTYAMSWVRQAPGKGLEWVSAISGSGGRTFYAESVEGRFTISRDNSKNTLYLQMNSLRAEDTAVYYCAKHDYSNYPYFDYWGQGTLVTVSS

SEQ ID NO: 1153 - protein, 108 aa, Artificial Sequence; identical to SEQ ID NO: 208
  Synthetic peptide

SEQ ID NO: 1154 - protein, 243 aa, Artificial Sequence
  Synthetic peptide
EVQLLESGGGMVQPGGSLRLSCAASGFTFSTYAMSWVRQAPGKGLEWVSAISGSGGRTFYAESVEGRFTISRDNSKNTLYLQMNSLRAEDTAVYYCAKHDYSNYPYFDYWGQGTLVTVSSGGGGSGGGGSGGGGSEIVLTQSPGTLSLSPGERATLSCRASQSVRSTYLAWYQQKPGQAPRLLIYGASSRATGIPDRFSGSGSGTDFTLTISRLEPEDFAVYSCQQYGDLPFTFGPGTKLEIK

SEQ ID NO: 1155 - protein, 498 aa, Artificial Sequence
  Synthetic peptide
EVQLLESGGGMVQPGGSLRLSCAASGFTFSTYAMSWVRQAPGKGLEWVSAISGSGGRTFYAESVEGRFTISRDNSKNTLYLQMNSLRAEDTAVYYCAKHDYSNYPYFDYWGQGTLVTVSSGGGGSGGGGSGGGGSEIVLTQSPGTLSLSPGERATLSCRASQSVRSTYLAWYQQKPGQAPRLLIYGASSRATGIPDRFSGSGSGTDFTLTISRLEPEDFAVYSCQQYGDLPFTFGPGTKLEIKSGGGGSEVQLVESGGGLVQPGGSLKLSCAASGFTFNKYAMNWVRQAPGKGLEWVARIRSKYNNYATYYADSVKDRFTISRDDSKNTAYLQMNNLKTEDTAVYYCVRHGNFGNSYISYWAYWGQGTLVTVSSGGGGSGGGGSGGGGSQTVVTQEPSLTVSPGGTVTLTCGSSTGAVTSGNYPNWVQQKPGQAPRGLIGGTKFLAPGTPARFSGSLLGGKAALTLSGVQPEDEAEYYCVLWYSNRWVFGGGTKLTVL

SEQ ID NO: 1156 - protein, 5 aa, Artificial Sequence
  Synthetic peptide
SYAMS

SEQ ID NO: 1157 - protein, 17 aa, Artificial Sequence
  Synthetic peptide
AISGSGGYTYYAESVKG

SEQ ID NO: 1158 - protein, 11 aa, Artificial Sequence
  Synthetic peptide
HDYSNYPYFDY

SEQ ID NO: 1159 - protein, 12 aa, Artificial Sequence
  Synthetic peptide
RASQSVRSNYLA

SEQ ID NO: 1160 - protein, 7 aa, Artificial Sequence
  Synthetic peptide
GASSRAT

SEQ ID NO: 1161 - protein, 9 aa, Artificial Sequence
  Synthetic peptide
QQYGDLPFT

SEQ ID NO: 1162 - protein, 120 aa, Artificial Sequence
  Synthetic peptide
EVQLLESGGGLVQPGGSLRLSCAASGFTFSSYAMSWVRQAPGKCLEWVSAISGSGGYTYYAESVKGRFTISRDNSKNTLYLQMNSLRAEDTAVYYCAKHDYSNYPYFDYWGQGTLVTVSS

SEQ ID NO: 1163 - protein, 108 aa, Artificial Sequence; identical to SEQ ID NO: 953
  Synthetic peptide

SEQ ID NO: 1164 - protein, 243 aa, Artificial Sequence
  Synthetic peptide
EVQLLESGGGLVQPGGSLRLSCAASGFTFSSYAMSWVRQAPGKCLEWVSAISGSGGYTYYAESVKGRFTISRDNSKNTLYLQMNSLRAEDTAVYYCAKHDYSNYPYFDYWGQGTLVTVSSGGGGSGGGGSGGGGSEIVLTQSPGTLSLSPGERATLSCRASQSVRSNYLAWYQQKPGQAPRLLIYGASSRATGIPDRFSGSGSGTDFTLTISRLEPEDFAVYYCQQYGDLPFTFGCGTKVEIK

SEQ ID NO: 1165 - protein, 498 aa, Artificial Sequence
  Synthetic peptide
EVQLLESGGGLVQPGGSLRLSCAASGFTFSSYAMSWVRQAPGKCLEWVSAISGSGGYTYYAESVKGRFTISRDNSKNTLYLQMNSLRAEDTAVYYCAKHDYSNYPYFDYWGQGTLVTVSSGGGGSGGGGSGGGGSEIVLTQSPGTLSLSPGERATLSCRASQSVRSNYLAWYQQKPGQAPRLLIYGASSRATGIPDRFSGSGSGTDFTLTISRLEPEDFAVYYCQQYGDLPFTFGCGTKVEIKSGGGGSEVQLVESGGGLVQPGGSLKLSCAASGFTFNKYAMNWVRQAPGKGLEWVARIRSKYNNYATYYADSVKDRFTISRDDSKNTAYLQMNNLKTEDTAVYYCVRHGNFGNSYISYWAYWGQGTLVTVSSGGGGSGGGGSGGGGSQTVVTQEPSLTVSPGGTVTLTCGSSTGAVTSGNYPNWVQQKPGQAPRGLIGGTKFLAPGTPARFSGSLLGGKAALTLSGVQPEDEAEYYCVLWYSNRWVFGGGTKLTVL

SEQ ID NO: 1166 - protein, 120 aa, Artificial Sequence
  Synthetic peptide
EVQLLESGGGLVQPGGSLRLSCAASGFTFSSYAMSWVRQAPGKGLEWVSAISGSGGYTYYAESVKGRFTISRDNSKNTLYLQMNSLRAEDTAVYYCAKHDYSNYPYFDYWGQGTLVTVSS

SEQ ID NO: 1167 - protein, 108 aa, Artificial Sequence; identical to SEQ ID NO: 218
  Synthetic peptide

SEQ ID NO: 1168 - protein, 243 aa, Artificial Sequence
  Synthetic peptide
EVQLLESGGGLVQPGGSLRLSCAASGFTFSSYAMSWVRQAPGKGLEWVSAISGSGGYTYYAESVKGRFTISRDNSKNTLYLQMNSLRAEDTAVYYCAKHDYSNYPYFDYWGQGTLVTVSSGGGGSGGGGSGGGGSEIVLTQSPGTLSLSPGERATLSCRASQSVRSNYLAWYQQKPGQAPRLLIYGASSRATGIPDRFSGSGSGTDFTLTISRLEPEDFAVYYCQQYGDLPFTFGPGTKVEIK

SEQ ID NO: 1169 - protein, 498 aa, Artificial Sequence
  Synthetic peptide
EVQLLESGGGLVQPGGSLRLSCAASGFTFSSYAMSWVRQAPGKGLEWVSAISGSGGYTYYAESVKGRFTISRDNSKNTLYLQMNSLRAEDTAVYYCAKHDYSNYPYFDYWGQGTLVTVSSGGGGSGGGGSGGGGSEIVLTQSPGTLSLSPGERATLSCRASQSVRSNYLAWYQQKPGQAPRLLIYGASSRATGIPDRFSGSGSGTDFTLTISRLEPEDFAVYYCQQYGDLPFTFGPGTKVEIKSGGGGSEVQLVESGGGLVQPGGSLKLSCAASGFTFNKYAMNWVRQAPGKGLEWVARIRSKYNNYATYYADSVKDRFTISRDDSKNTAYLQMNNLKTEDTAVYYCVRHGNFGNSYISYWAYWGQGTLVTVSSGGGGSGGGGSGGGGSQTVVTQEPSLTVSPGGTVTLTCGSSTGAVTSGNYPNWVQQKPGQAPRGLIGGTKFLAPGTPARFSGSLLGGKAALTLSGVQPEDEAEYYCVLWYSNRWVFGGGTKLTVL

SEQ ID NO: 1170 - protein, 5 aa, Artificial Sequence
  Synthetic peptide
SYAMS

SEQ ID NO: 1171 - protein, 17 aa, Artificial Sequence
  Synthetic peptide
AISGSGGSTFYAESVKG

SEQ ID NO: 1172 - protein, 11 aa, Artificial Sequence
  Synthetic peptide
HDYSNYPYFDY

SEQ ID NO: 1173 - protein, 12 aa, Artificial Sequence
  Synthetic peptide
RASQSVRSSYLA

SEQ ID NO: 1174 - protein, 7 aa, Artificial Sequence
  Synthetic peptide
GASSRAT

SEQ ID NO: 1175 - protein, 9 aa, Artificial Sequence
  Synthetic peptide
QQYGDLPFT

SEQ ID NO: 1176 - protein, 120 aa, Artificial Sequence
  Synthetic peptide
EVQLLESGGGLAQPGGSLRLSCAASGFTFSSYAMSWVRQAPGKCLEWVSAISGSGGSTFYAESVKGRFTISRDNSKNTLYLQMNSLRAEDTAVYFCAKHDYSNYPYFDYWGQGTLVTVSS

SEQ ID NO: 1177 - protein, 108 aa, Artificial Sequence; identical to SEQ ID NO: 638
  Synthetic peptide

SEQ ID NO: 1178 - protein, 243 aa, Artificial Sequence
  Synthetic peptide
EVQLLESGGGLAQPGGSLRLSCAASGFTFSSYAMSWVRQAPGKCLEWVSAISGSGGSTFYAESVKGRFTISRDNSKNTLYLQMNSLRAEDTAVYFCAKHDYSNYPYFDYWGQGTLVTVSSGGGGSGGGGSGGGGSEIVLTQSPGTLSLSPGERATLSCRASQSVRSSYLAWYQQKPGQAPRLLIYGASSRATGIPDRFSGSGSGTDFTLTISRLEPEDFAVYYCQQYGDLPFTFGCGTKVEIK

SEQ ID NO: 1179 - protein, 498 aa, Artificial Sequence
  Synthetic peptide
EVQLLESGGGLAQPGGSLRLSCAASGFTFSSYAMSWVRQAPGKCLEWVSAISGSGGSTFYAESVKGRFTISRDNSKNTLYLQMNSLRAEDTAVYFCAKHDYSNYPYFDYWGQGTLVTVSSGGGGSGGGGSGGGGSEIVLTQSPGTLSLSPGERATLSCRASQSVRSSYLAWYQQKPGQAPRLLIYGASSRATGIPDRFSGSGSGTDFTLTISRLEPEDFAVYYCQQYGDLPFTFGCGTKVEIKSGGGGSEVQLVESGGGLVQPGGSLKLSCAASGFTFNKYAMNWVRQAPGKGLEWVARIRSKYNNYATYYADSVKDRFTISRDDSKNTAYLQMNNLKTEDTAVYYCVRHGNFGNSYISYWAYWGQGTLVTVSSGGGGSGGGGSGGGGSQTVVTQEPSLTVSPGGTVTLTCGSSTGAVTSGNYPNWVQQKPGQAPRGLIGGTKFLAPGTPARFSGSLLGGKAALTLSGVQPEDEAEYYCVLWYSNRWVFGGGTKLTVL

SEQ ID NO: 1180 - protein, 120 aa, Artificial Sequence
  Synthetic peptide
EVQLLESGGGLAQPGGSLRLSCAASGFTFSSYAMSWVRQAPGKGLEWVSAISGSGGSTFYAESVKGRFTISRDNSKNTLYLQMNSLRAEDTAVYFCAKHDYSNYPYFDYWGQGTLVTVSS

SEQ ID NO: 1181 - protein, 108 aa, Artificial Sequence; identical to SEQ ID NO: 228
  Synthetic peptide

SEQ ID NO: 1182 - protein, 243 aa, Artificial Sequence
  Synthetic peptide
EVQLLESGGGLAQPGGSLRLSCAASGFTFSSYAMSWVRQAPGKGLEWVSAISGSGGSTFYAESVKGRFTISRDNSKNTLYLQMNSLRAEDTAVYFCAKHDYSNYPYFDYWGQGTLVTVSSGGGGSGGGGSGGGGSEIVLTQSPGTLSLSPGERATLSCRASQSVRSSYLAWYQQKPGQAPRLLIYGASSRATGIPDRFSGSGSGTDFTLTISRLEPEDFAVYYCQQYGDLPFTFGPGTKVEIK

SEQ ID NO: 1183 - protein, 498 aa, Artificial Sequence
  Synthetic peptide
EVQLLESGGGLAQPGGSLRLSCAASGFTFSSYAMSWVRQAPGKGLEWVSAISGSGGSTFYAESVKGRFTISRDNSKNTLYLQMNSLRAEDTAVYFCAKHDYSNYPYFDYWGQGTLVTVSSGGGGSGGGGSGGGGSEIVLTQSPGTLSLSPGERATLSCRASQSVRSSYLAWYQQKPGQAPRLLIYGASSRATGIPDRFSGSGSGTDFTLTISRLEPEDFAVYYCQQYGDLPFTFGPGTKVEIKSGGGGSEVQLVESGGGLVQPGGSLKLSCAASGFTFNKYAMNWVRQAPGKGLEWVARIRSKYNNYATYYADSVKDRFTISRDDSKNTAYLQMNNLKTEDTAVYYCVRHGNFGNSYISYWAYWGQGTLVTVSSGGGGSGGGGSGGGGSQTVVTQEPSLTVSPGGTVTLTCGSSTGAVTSGNYPNWVQQKPGQAPRGLIGGTKFLAPGTPARFSGSLLGGKAALTLSGVQPEDEAEYYCVLWYSNRWVFGGGTKLTVL

SEQ ID NO: 1184 - protein, 5 aa, Artificial Sequence
  Synthetic peptide
SYAMS

SEQ ID NO: 1185 - protein, 17 aa, Artificial Sequence
  Synthetic peptide
AISGSGGRTFYAESVEG

SEQ ID NO: 1186 - protein, 11 aa, Artificial Sequence
  Synthetic peptide
HDYSNYPYFDY

SEQ ID NO: 1187 - protein, 12 aa, Artificial Sequence
  Synthetic peptide
RASQSVRSNYLA

SEQ ID NO: 1188 - protein, 7 aa, Artificial Sequence
  Synthetic peptide
GASSRAT

SEQ ID NO: 1189 - protein, 9 aa, Artificial Sequence
  Synthetic peptide
QQYGDLPFT

SEQ ID NO: 1190 - protein, 120 aa, Artificial Sequence; identical to SEQ ID NO: 1092
  Synthetic peptide

SEQ ID NO: 1191 - protein, 108 aa, Artificial Sequence; identical to SEQ ID NO: 953
  Synthetic peptide

SEQ ID NO: 1192 - protein, 243 aa, Artificial Sequence
  Synthetic peptide
EVQLLESGGGMVQPGGSLRLSCAASGFTFSSYAMSWVRQAPGKCLEWVSAISGSGGRTFYAESVEGRFTISRDNSKNTLYLQMNSLRAEDTAVYYCAKHDYSNYPYFDYWGQGTLVTVSSGGGGSGGGGSGGGGSEIVLTQSPGTLSLSPGERATLSCRASQSVRSNYLAWYQQKPGQAPRLLIYGASSRATGIPDRFSGSGSGTDFTLTISRLEPEDFAVYYCQQYGDLPFTFGCGTKVEIK

SEQ ID NO: 1193 - protein, 498 aa, Artificial Sequence
  Synthetic peptide
EVQLLESGGGMVQPGGSLRLSCAASGFTFSSYAMSWVRQAPGKCLEWVSAISGSGGRTFYAESVEGRFTISRDNSKNTLYLQMNSLRAEDTAVYYCAKHDYSNYPYFDYWGQGTLVTVSSGGGGSGGGGSGGGGSEIVLTQSPGTLSLSPGERATLSCRASQSVRSNYLAWYQQKPGQAPRLLIYGASSRATGIPDRFSGSGSGTDFTLTISRLEPEDFAVYYCQQYGDLPFTFGCGTKVEIKSGGGGSEVQLVESGGGLVQPGGSLKLSCAASGFTFNKYAMNWVRQAPGKGLEWVARIRSKYNNYATYYADSVKDRFTISRDDSKNTAYLQMNNLKTEDTAVYYCVRHGNFGNSYISYWAYWGQGTLVTVSSGGGGSGGGGSGGGGSQTVVTQEPSLTVSPGGTVTLTCGSSTGAVTSGNYPNWVQQKPGQAPRGLIGGTKFLAPGTPARFSGSLLGGKAALTLSGVQPEDEAEYYCVLWYSNRWVFGGGTKLTVL

SEQ ID NO: 1194 - protein, 120 aa, Artificial Sequence; identical to SEQ ID NO: 1096
  Synthetic peptide

SEQ ID NO: 1195 - protein, 108 aa, Artificial Sequence; identical to SEQ ID NO: 218
  Synthetic peptide

SEQ ID NO: 1196 - protein, 243 aa, Artificial Sequence
  Synthetic peptide
EVQLLESGGGMVQPGGSLRLSCAASGFTFSSYAMSWVRQAPGKGLEWVSAISGSGGRTFYAESVEGRFTISRDNSKNTLYLQMNSLRAEDTAVYYCAKHDYSNYPYFDYWGQGTLVTVSSGGGGSGGGGSGGGGSEIVLTQSPGTLSLSPGERATLSCRASQSVRSNYLAWYQQKPGQAPRLLIYGASSRATGIPDRFSGSGSGTDFTLTISRLEPEDFAVYYCQQYGDLPFTFGPGTKVEIK

SEQ ID NO: 1197 - protein, 498 aa, Artificial Sequence
  Synthetic peptide
EVQLLESGGGMVQPGGSLRLSCAASGFTFSSYAMSWVRQAPGKGLEWVSAISGSGGRTFYAESVEGRFTISRDNSKNTLYLQMNSLRAEDTAVYYCAKHDYSNYPYFDYWGQGTLVTVSSGGGGSGGGGSGGGGSEIVLTQSPGTLSLSPGERATLSCRASQSVRSNYLAWYQQKPGQAPRLLIYGASSRATGIPDRFSGSGSGTDFTLTISRLEPEDFAVYYCQQYGDLPFTFGPGTKVEIKSGGGGSEVQLVESGGGLVQPGGSLKLSCAASGFTFNKYAMNWVRQAPGKGLEWVARIRSKYNNYATYYADSVKDRFTISRDDSKNTAYLQMNNLKTEDTAVYYCVRHGNFGNSYISYWAYWGQGTLVTVSSGGGGSGGGGSGGGGSQTVVTQEPSLTVSPGGTVTLTCGSSTGAVTSGNYPNWVQQKPGQAPRGLIGGTKFLAPGTPARFSGSLLGGKAALTLSGVQPEDEAEYYCVLWYSNRWVFGGGTKLTVL

SEQ ID NO: 1198 - protein, 5 aa, Artificial Sequence
  Synthetic peptide
SYAMS

SEQ ID NO: 1199 - protein, 17 aa, Artificial Sequence
  Synthetic peptide
AISGSGGRTFYAESVEG

SEQ ID NO: 1200 - protein, 11 aa, Artificial Sequence
  Synthetic peptide
HDYSNYPYFDY

SEQ ID NO: 1201 - protein, 12 aa, Artificial Sequence
  Synthetic peptide
RASQSVRSSYLA

SEQ ID NO: 1202 - protein, 7 aa, Artificial Sequence
  Synthetic peptide
GASSRAT

SEQ ID NO: 1203 - protein, 9 aa, Artificial Sequence
  Synthetic peptide
QQYGSSPFT

SEQ ID NO: 1204 - protein, 120 aa, Artificial Sequence; identical to SEQ ID NO: 1092
  Synthetic peptide

SEQ ID NO: 1205 - protein, 108 aa, Artificial Sequence; identical to SEQ ID NO: 965
  Synthetic peptide

SEQ ID NO: 1206 - protein, 243 aa, Artificial Sequence
  Synthetic peptide
EVQLLESGGGMVQPGGSLRLSCAASGFTFSSYAMSWVRQAPGKCLEWVSAISGSGGRTFYAESVEGRFTISRDNSKNTLYLQMNSLRAEDTAVYYCAKHDYSNYPYFDYWGQGTLVTVSSGGGGSGGGGSGGGGSEIVLTQSPGTLSLSPGERATLSCRASQSVRSSYLAWYQQKPGQAPRLLIYGASSRATGIPDRFSGSGSGTDFTLTISRLEPEDFAVYYCQQYGSSPFTFGCGTKVEIK

SEQ ID NO: 1207 - protein, 498 aa, Artificial Sequence
  Synthetic peptide
EVQLLESGGGMVQPGGSLRLSCAASGFTFSSYAMSWVRQAPGKCLEWVSAISGSGGRTFYAESVEGRFTISRDNSKNTLYLQMNSLRAEDTAVYYCAKHDYSNYPYFDYWGQGTLVTVSSGGGGSGGGGSGGGGSEIVLTQSPGTLSLSPGERATLSCRASQSVRSSYLAWYQQKPGQAPRLLIYGASSRATGIPDRFSGSGSGTDFTLTISRLEPEDFAVYYCQQYGSSPFTFGCGTKVEIKSGGGGSEVQLVESGGGLVQPGGSLKLSCAASGFTFNKYAMNWVRQAPGKGLEWVARIRSKYNNYATYYADSVKDRFTISRDDSKNTAYLQMNNLKTEDTAVYYCVRHGNFGNSYISYWAYWGQGTLVTVSSGGGGSGGGGSGGGGSQTVVTQEPSLTVSPGGTVTLTCGSSTGAVTSGNYPNWVQQKPGQAPRGLIGGTKFLAPGTPARFSGSLLGGKAALTLSGVQPEDEAEYYCVLWYSNRWVFGGGTKLTVL

SEQ ID NO: 1208 - protein, 120 aa, Artificial Sequence; identical to SEQ ID NO: 1096
  Synthetic peptide

SEQ ID NO: 1209 - protein, 108 aa, Artificial Sequence; identical to SEQ ID NO: 258
  Synthetic peptide

SEQ ID NO: 1210 - protein, 243 aa, Artificial Sequence
  Synthetic peptide
EVQLLESGGGMVQPGGSLRLSCAASGFTFSSYAMSWVRQAPGKGLEWVSAISGSGGRTFYAESVEGRFTISRDNSKNTLYLQMNSLRAEDTAVYYCAKHDYSNYPYFDYWGQGTLVTVSSGGGGSGGGGSGGGGSEIVLTQSPGTLSLSPGERATLSCRASQSVRSSYLAWYQQKPGQAPRLLIYGASSRATGIPDRFSGSGSGTDFTLTISRLEPEDFAVYYCQQYGSSPFTFGPGTKVEIK

SEQ ID NO: 1211 - protein, 498 aa, Artificial Sequence
  Synthetic peptide
EVQLLESGGGMVQPGGSLRLSCAASGFTFSSYAMSWVRQAPGKGLEWVSAISGSGGRTFYAESVEGRFTISRDNSKNTLYLQMNSLRAEDTAVYYCAKHDYSNYPYFDYWGQGTLVTVSSGGGGSGGGGSGGGGSEIVLTQSPGTLSLSPGERATLSCRASQSVRSSYLAWYQQKPGQAPRLLIYGASSRATGIPDRFSGSGSGTDFTLTISRLEPEDFAVYYCQQYGSSPFTFGPGTKVEIKSGGGGSEVQLVESGGGLVQPGGSLKLSCAASGFTFNKYAMNWVRQAPGKGLEWVARIRSKYNNYATYYADSVKDRFTISRDDSKNTAYLQMNNLKTEDTAVYYCVRHGNFGNSYISYWAYWGQGTLVTVSSGGGGSGGGGSGGGGSQTVVTQEPSLTVSPGGTVTLTCGSSTGAVTSGNYPNWVQQKPGQAPRGLIGGTKFLAPGTPARFSGSLLGGKAALTLSGVQPEDEAEYYCVLWYSNRWVFGGGTKLTVL

SEQ ID NO: 1212 - protein, 5 aa, Artificial Sequence
  Synthetic peptide
SYAMS

SEQ ID NO: 1213 - protein, 17 aa, Artificial Sequence
  Synthetic peptide
AISGSGGSTFYAESVQG

SEQ ID NO: 1214 - protein, 11 aa, Artificial Sequence
  Synthetic peptide
HDYSNYPYFDY

SEQ ID NO: 1215 - protein, 12 aa, Artificial Sequence
  Synthetic peptide
RASQSVRGNYLA

SEQ ID NO: 1216 - protein, 7 aa, Artificial Sequence
  Synthetic peptide
GASSRAT

SEQ ID NO: 1217 - protein, 9 aa, Artificial Sequence
  Synthetic peptide
QQYGYSPFT

SEQ ID NO: 1218 - protein, 120 aa, Artificial Sequence
  Synthetic peptide
EVQLLESGGGLVQPGGSLRLSCAASGFTFSSYAMSWVRQAPGKCLEWVSAISGSGGSTFYAESVQGRFTISRDNSKNTLYLQVNSLRAEDTAVYYCARHDYSNYPYFDYWGQGTLVTVSS

SEQ ID NO: 1219 - protein, 108 aa, Artificial Sequence; identical to SEQ ID NO: 973
  Synthetic peptide

SEQ ID NO: 1220 - protein, 243 aa, Artificial Sequence
  Synthetic peptide
EVQLLESGGGLVQPGGSLRLSCAASGFTFSSYAMSWVRQAPGKCLEWVSAISGSGGSTFYAESVQGRFTISRDNSKNTLYLQVNSLRAEDTAVYYCARHDYSNYPYFDYWGQGTLVTVSSGGGGSGGGGSGGGGSEIVLTQSPGTLSLSPGERATLSCRASQSVRGNYLAWYQQKPGQAPRLLIYGASSRATGIPDRFSGSGSGTDFTLTISRLEPEDFAVYYCQQYGYSPFTFGCGTKVEIK

SEQ ID NO: 1221 - protein, 498 aa, Artificial Sequence
  Synthetic peptide
EVQLLESGGGLVQPGGSLRLSCAASGFTFSSYAMSWVRQAPGKCLEWVSAISGSGGSTFYAESVQGRFTISRDNSKNTLYLQVNSLRAEDTAVYYCARHDYSNYPYFDYWGQGTLVTVSSGGGGSGGGGSGGGGSEIVLTQSPGTLSLSPGERATLSCRASQSVRGNYLAWYQQKPGQAPRLLIYGASSRATGIPDRFSGSGSGTDFTLTISRLEPEDFAVYYCQQYGYSPFTFGCGTKVEIKSGGGGSEVQLVESGGGLVQPGGSLKLSCAASGFTFNKYAMNWVRQAPGKGLEWVARIRSKYNNYATYYADSVKDRFTISRDDSKNTAYLQMNNLKTEDTAVYYCVRHGNFGNSYISYWAYWGQGTLVTVSSGGGGSGGGGSGGGGSQTVVTQEPSLTVSPGGTVTLTCGSSTGAVTSGNYPNWVQQKPGQAPRGLIGGTKFLAPGTPARFSGSLLGGKAALTLSGVQPEDEAEYYCVLWYSNRWVFGGGTKLTVL

SEQ ID NO: 1222 - protein, 120 aa, Artificial Sequence
  Synthetic peptide
EVQLLESGGGLVQPGGSLRLSCAASGFTFSSYAMSWVRQAPGKGLEWVSAISGSGGSTFYAESVQGRFTISRDNSKNTLYLQVNSLRAEDTAVYYCARHDYSNYPYFDYWGQGTLVTVSS

SEQ ID NO: 1223 - protein, 108 aa, Artificial Sequence; identical to SEQ ID NO: 969
  Synthetic peptide

SEQ ID NO: 1224 - protein, 243 aa, Artificial Sequence
  Synthetic peptide
EVQLLESGGGLVQPGGSLRLSCAASGFTFSSYAMSWVRQAPGKGLEWVSAISGSGGSTFYAESVQGRFTISRDNSKNTLYLQVNSLRAEDTAVYYCARHDYSNYPYFDYWGQGTLVTVSSGGGGSGGGGSGGGGSEIVLTQSPGTLSLSPGERATLSCRASQSVRGNYLAWYQQKPGQAPRLLIYGASSRATGIPDRFSGSGSGTDFTLTISRLEPEDFAVYYCQQYGYSPFTFGPGTKVEIK

SEQ ID NO: 1225 - protein, 498 aa, Artificial Sequence
  Synthetic peptide
EVQLLESGGGLVQPGGSLRLSCAASGFTFSSYAMSWVRQAPGKGLEWVSAISGSGGSTFYAESVQGRFTISRDNSKNTLYLQVNSLRAEDTAVYYCARHDYSNYPYFDYWGQGTLVTVSSGGGGSGGGGSGGGGSEIVLTQSPGTLSLSPGERATLSCRASQSVRGNYLAWYQQKPGQAPRLLIYGASSRATGIPDRFSGSGSGTDFTLTISRLEPEDFAVYYCQQYGYSPFTFGPGTKVEIKSGGGGSEVQLVESGGGLVQPGGSLKLSCAASGFTFNKYAMNWVRQAPGKGLEWVARIRSKYNNYATYYADSVKDRFTISRDDSKNTAYLQMNNLKTEDTAVYYCVRHGNFGNSYISYWAYWGQGTLVTVSSGGGGSGGGGSGGGGSQTVVTQEPSLTVSPGGTVTLTCGSSTGAVTSGNYPNWVQQKPGQAPRGLIGGTKFLAPGTPARFSGSLLGGKAALTLSGVQPEDEAEYYCVLWYSNRWVFGGGTKLTVL

SEQ ID NO: 1226 - protein, 5 aa, Artificial Sequence
  Synthetic peptide
TYAMS

SEQ ID NO: 1227 - protein, 17 aa, Artificial Sequence
  Synthetic peptide
AISGSGGGTFYAESVKG

SEQ ID NO: 1228 - protein, 11 aa, Artificial Sequence
  Synthetic peptide
HDYSNYPYFDY

SEQ ID NO: 1229 - protein, 12 aa, Artificial Sequence
  Synthetic peptide
RASQSIRSNYLA

SEQ ID NO: 1230 - protein, 7 aa, Artificial Sequence
  Synthetic peptide
GASSRAT

SEQ ID NO: 1231 - protein, 9 aa, Artificial Sequence
  Synthetic peptide
QQYGSSPFT

SEQ ID NO: 1232 - protein, 120 aa, Artificial Sequence
  Synthetic peptide
EVQLLESGGGLVQPGGSLRLSCAASGFTFSTYAMSWVRQAPGKCLEWVSAISGSGGGTFYAESVKGRFTISRDNSKNTLYLQMNSLRAEDTAVYYCAKHDYSNYPYFDYWGQGTLVTVSS

SEQ ID NO: 1233 - protein, 108 aa, Artificial Sequence; identical to SEQ ID NO: 977
  Synthetic peptide

SEQ ID NO: 1234 - protein, 243 aa, Artificial Sequence
  Synthetic peptide
EVQLLESGGGLVQPGGSLRLSCAASGFTFSTYAMSWVRQAPGKCLEWVSAISGSGGGTFYAESVKGRFTISRDNSKNTLYLQMNSLRAEDTAVYYCAKHDYSNYPYFDYWGQGTLVTVSSGGGGSGGGGSGGGGSEIVLTQSPGTLSLSPGERATLSCRASQSIRSNYLAWYQQKPGQAPRLLIYGASSRATGIPDRFSGSGSGTDFTLTISRLEPEDFAVYYCQQYGSSPFTFGCGTKVEIK

SEQ ID NO: 1235 - protein, 498 aa, Artificial Sequence
  Synthetic peptide
EVQLLESGGGLVQPGGSLRLSCAASGFTFSTYAMSWVRQAPGKCLEWVSAISGSGGGTFYAESVKGRFTISRDNSKNTLYLQMNSLRAEDTAVYYCAKHDYSNYPYFDYWGQGTLVTVSSGGGGSGGGGSGGGGSEIVLTQSPGTLSLSPGERATLSCRASQSIRSNYLAWYQQKPGQAPRLLIYGASSRATGIPDRFSGSGSGTDFTLTISRLEPEDFAVYYCQQYGSSPFTFGCGTKVEIKSGGGGSEVQLVESGGGLVQPGGSLKLSCAASGFTFNKYAMNWVRQAPGKGLEWVARIRSKYNNYATYYADSVKDRFTISRDDSKNTAYLQMNNLKTEDTAVYYCVRHGNFGNSYISYWAYWGQGTLVTVSSGGGGSGGGGSGGGGSQTVVTQEPSLTVSPGGTVTLTCGSSTGAVTSGNYPNWVQQKPGQAPRGLIGGTKFLAPGTPARFSGSLLGGKAALTLSGVQPEDEAEYYCVLWYSNRWVFGGGTKLTVL

SEQ ID NO: 1236 - protein, 120 aa, Artificial Sequence
  Synthetic peptide
EVQLLESGGGLVQPGGSLRLSCAASGFTFSTYAMSWVRQAPGKGLEWVSAISGSGGGTFYAESVKGRFTISRDNSKNTLYLQMNSLRAEDTAVYYCAKHDYSNYPYFDYWGQGTLVTVSS

SEQ ID NO: 1237 - protein, 108 aa, Artificial Sequence; identical to SEQ ID NO: 268
  Synthetic peptide

SEQ ID NO: 1238 - protein, 243 aa, Artificial Sequence
  Synthetic peptide
EVQLLESGGGLVQPGGSLRLSCAASGFTFSTYAMSWVRQAPGKGLEWVSAISGSGGGTFYAESVKGRFTISRDNSKNTLYLQMNSLRAEDTAVYYCAKHDYSNYPYFDYWGQGTLVTVSSGGGGSGGGGSGGGGSEIVLTQSPGTLSLSPGERATLSCRASQSIRSNYLAWYQQKPGQAPRLLIYGASSRATGIPDRFSGSGSGTDFTLTISRLEPEDFAVYYCQQYGSSPFTFGPGTKVEIK

SEQ ID NO: 1239 - protein, 498 aa, Artificial Sequence
  Synthetic peptide
EVQLLESGGGLVQPGGSLRLSCAASGFTFSTYAMSWVRQAPGKGLEWVSAISGSGGGTFYAESVKGRFTISRDNSKNTLYLQMNSLRAEDTAVYYCAKHDYSNYPYFDYWGQGTLVTVSSGGGGSGGGGSGGGGSEIVLTQSPGTLSLSPGERATLSCRASQSIRSNYLAWYQQKPGQAPRLLIYGASSRATGIPDRFSGSGSGTDFTLTISRLEPEDFAVYYCQQYGSSPFTFGPGTKVEIKSGGGGSEVQLVESGGGLVQPGGSLKLSCAASGFTFNKYAMNWVRQAPGKGLEWVARIRSKYNNYATYYADSVKDRFTISRDDSKNTAYLQMNNLKTEDTAVYYCVRHGNFGNSYISYWAYWGQGTLVTVSSGGGGSGGGGSGGGGSQTVVTQEPSLTVSPGGTVTLTCGSSTGAVTSGNYPNWVQQKPGQAPRGLIGGTKFLAPGTPARFSGSLLGGKAALTLSGVQPEDEAEYYCVLWYSNRWVFGGGTKLTVL

SEQ ID NO: 1240 - protein, 5 aa, Artificial Sequence
  Synthetic peptide
TYAMS

SEQ ID NO: 1241 - protein, 17 aa, Artificial Sequence
  Synthetic peptide
LISGSGGRTYYAESVKG

SEQ ID NO: 1242 - protein, 11 aa, Artificial Sequence
  Synthetic peptide
HDYSNYPYFDY

SEQ ID NO: 1243 - protein, 12 aa, Artificial Sequence
  Synthetic peptide
RASQSVRSNYLA

SEQ ID NO: 1244 - protein, 7 aa, Artificial Sequence
  Synthetic peptide
GASNRAT

SEQ ID NO: 1245 - protein, 9 aa, Artificial Sequence
  Synthetic peptide
QQYGISPPT

SEQ ID NO: 1246 - protein, 120 aa, Artificial Sequence
  Synthetic peptide
EVQLLESGGGLVQPGGSLRLSCAASGFTFSTYAMSWVRQAPGKCLEWVSLISGSGGRTYYAESVKGRFTISRDNSKNTLYLQMNSLRAEDTAVYYCAKHDYSNYPYFDYWGQGTLVTVSS

SEQ ID NO: 1247 - protein, 108 aa, Artificial Sequence; identical to SEQ ID NO: 981
  Synthetic peptide

SEQ ID NO: 1248 - protein, 243 aa, Artificial Sequence
  Synthetic peptide
EVQLLESGGGLVQPGGSLRLSCAASGFTFSTYAMSWVRQAPGKCLEWVSLISGSGGRTYYAESVKGRFTISRDNSKNTLYLQMNSLRAEDTAVYYCAKHDYSNYPYFDYWGQGTLVTVSSGGGGSGGGGSGGGGSEIVLTQSPGTLSLSPGERATLSCRASQSVRSNYLAWYQQKPGQAPRLLIYGASNRATGIPDRFSGSGSGTDFTLTISRLEPEDFAVYSCQQYGISPPTFGCGTKVEIK

SEQ ID NO: 1249 - protein, 498 aa, Artificial Sequence
  Synthetic peptide
EVQLLESGGGLVQPGGSLRLSCAASGFTFSTYAMSWVRQAPGKCLEWVSLISGSGGRTYYAESVKGRFTISRDNSKNTLYLQMNSLRAEDTAVYYCAKHDYSNYPYFDYWGQGTLVTVSSGGGGSGGGGSGGGGSEIVLTQSPGTLSLSPGERATLSCRASQSVRSNYLAWYQQKPGQAPRLLIYGASNRATGIPDRFSGSGSGTDFTLTISRLEPEDFAVYSCQQYGISPPTFGCGTKVEIKSGGGGSEVQLVESGGGLVQPGGSLKLSCAASGFTFNKYAMNWVRQAPGKGLEWVARIRSKYNNYATYYADSVKDRFTISRDDSKNTAYLQMNNLKTEDTAVYYCVRHGNFGNSYISYWAYWGQGTLVTVSSGGGGSGGGGSGGGGSQTVVTQEPSLTVSPGGTVTLTCGSSTGAVTSGNYPNWVQQKPGQAPRGLIGGTKFLAPGTPARFSGSLLGGKAALTLSGVQPEDEAEYYCVLWYSNRWVFGGGTKLTVL

SEQ ID NO: 1250 - protein, 120 aa, Artificial Sequence
  Synthetic peptide
EVQLLESGGGLVQPGGSLRLSCAASGFTFSTYAMSWVRQAPGKGLEWVSLISGSGGRTYYAESVKGRFTISRDNSKNTLYLQMNSLRAEDTAVYYCAKHDYSNYPYFDYWGQGTLVTVSS

SEQ ID NO: 1251 - protein, 108 aa, Artificial Sequence; identical to SEQ ID NO: 278
  Synthetic peptide

SEQ ID NO: 1252 - protein, 243 aa, Artificial Sequence
  Synthetic peptide
EVQLLESGGGLVQPGGSLRLSCAASGFTFSTYAMSWVRQAPGKGLEWVSLISGSGGRTYYAESVKGRFTISRDNSKNTLYLQMNSLRAEDTAVYYCAKHDYSNYPYFDYWGQGTLVTVSSGGGGSGGGGSGGGGSEIVLTQSPGTLSLSPGERATLSCRASQSVRSNYLAWYQQKPGQAPRLLIYGASNRATGIPDRFSGSGSGTDFTLTISRLEPEDFAVYSCQQYGISPPTFGGGTKVEIK

SEQ ID NO: 1253 - protein, 498 aa, Artificial Sequence
  Synthetic peptide
EVQLLESGGGLVQPGGSLRLSCAASGFTFSTYAMSWVRQAPGKGLEWVSLISGSGGRTYYAESVKGRFTISRDNSKNTLYLQMNSLRAEDTAVYYCAKHDYSNYPYFDYWGQGTLVTVSSGGGGSGGGGSGGGGSEIVLTQSPGTLSLSPGERATLSCRASQSVRSNYLAWYQQKPGQAPRLLIYGASNRATGIPDRFSGSGSGTDFTLTISRLEPEDFAVYSCQQYGISPPTFGGGTKVEIKSGGGGSEVQLVESGGGLVQPGGSLKLSCAASGFTFNKYAMNWVRQAPGKGLEWVARIRSKYNNYATYYADSVKDRFTISRDDSKNTAYLQMNNLKTEDTAVYYCVRHGNFGNSYISYWAYWGQGTLVTVSSGGGGSGGGGSGGGGSQTVVTQEPSLTVSPGGTVTLTCGSSTGAVTSGNYPNWVQQKPGQAPRGLIGGTKFLAPGTPARFSGSLLGGKAALTLSGVQPEDEAEYYCVLWYSNRWVFGGGTKLTVL

SEQ ID NO: 1254 - protein, 5 aa, Artificial Sequence
  Synthetic peptide
SYAMS

SEQ ID NO: 1255 - protein, 17 aa, Artificial Sequence
  Synthetic peptide
AISGSGGRAQYAESVQG

SEQ ID NO: 1256 - protein, 11 aa, Artificial Sequence
  Synthetic peptide
HDYSNYPYFDY

SEQ ID NO: 1257 - protein, 11 aa, Artificial Sequence
  Synthetic peptide
RASQSVSSNLA

SEQ ID NO: 1258 - protein, 7 aa, Artificial Sequence
  Synthetic peptide
GSSSRAT

SEQ ID NO: 1259 - protein, 9 aa, Artificial Sequence
  Synthetic peptide
QQYGSSPPP

SEQ ID NO: 1260 - protein, 120 aa, Artificial Sequence
  Synthetic peptide
EVQLLESGGGLVQPGGSLRLSCAASGFTFSSYAMSWVRQSPGKCLEWVSAISGSGGRAQYAESVQGRFTVSRDNSKNTLYLQMNSLRAEDTAVYYCAKHDYSNYPYFDYWGQGTLVTVSS

SEQ ID NO: 1261 - protein, 107 aa, Artificial Sequence; identical to SEQ ID NO: 985
  Synthetic peptide

SEQ ID NO: 1262 - protein, 242 aa, Artificial Sequence
  Synthetic peptide
EVQLLESGGGLVQPGGSLRLSCAASGFTFSSYAMSWVRQSPGKCLEWVSAISGSGGRAQYAESVQGRFTVSRDNSKNTLYLQMNSLRAEDTAVYYCAKHDYSNYPYFDYWGQGTLVTVSSGGGGSGGGGSGGGGSEIVLTQSPATLSVSPGERATLSCRASQSVSSNLAWYQQKPGQAPRLLIYGSSSRATGIPDRFSGSGSGTDFTLTISRLEPEDFAVYYCQQYGSSPPPFGCGTKVEIK

SEQ ID NO: 1263 - protein, 497 aa, Artificial Sequence
  Synthetic peptide
EVQLLESGGGLVQPGGSLRLSCAASGFTFSSYAMSWVRQSPGKCLEWVSAISGSGGRAQYAESVQGRFTVSRDNSKNTLYLQMNSLRAEDTAVYYCAKHDYSNYPYFDYWGQGTLVTVSSGGGGSGGGGSGGGGSEIVLTQSPATLSVSPGERATLSCRASQSVSSNLAWYQQKPGQAPRLLIYGSSSRATGIPDRFSGSGSGTDFTLTISRLEPEDFAVYYCQQYGSSPPPFGCGTKVEIKSGGGGSEVQLVESGGGLVQPGGSLKLSCAASGFTFNKYAMNWVRQAPGKGLEWVARIRSKYNNYATYYADSVKDRFTISRDDSKNTAYLQMNNLKTEDTAVYYCVRHGNFGNSYISYWAYWGQGTLVTVSSGGGGSGGGGSGGGGSQTVVTQEPSLTVSPGGTVTLTCGSSTGAVTSGNYPNWVQQKPGQAPRGLIGGTKFLAPGTPARFSGSLLGGKAALTLSGVQPEDEAEYYCVLWYSNRWVFGGGTKLTVL

SEQ ID NO: 1264 - protein, 120 aa, Artificial Sequence
  Synthetic peptide
EVQLLESGGGLVQPGGSLRLSCAASGFTFSSYAMSWVRQSPGKGLEWVSAISGSGGRAQYAESVQGRFTVSRDNSKNTLYLQMNSLRAEDTAVYYCAKHDYSNYPYFDYWGQGTLVTVSS

SEQ ID NO: 1265 - protein, 107 aa, Artificial Sequence; identical to SEQ ID NO: 308
  Synthetic peptide

SEQ ID NO: 1266 - protein, 242 aa, Artificial Sequence
  Synthetic peptide
EVQLLESGGGLVQPGGSLRLSCAASGFTFSSYAMSWVRQSPGKGLEWVSAISGSGGRAQYAESVQGRFTVSRDNSKNTLYLQMNSLRAEDTAVYYCAKHDYSNYPYFDYWGQGTLVTVSSGGGGSGGGGSGGGGSEIVLTQSPATLSVSPGERATLSCRASQSVSSNLAWYQQKPGQAPRLLIYGSSSRATGIPDRFSGSGSGTDFTLTISRLEPEDFAVYYCQQYGSSPPPFGGGTKVEIK

SEQ ID NO: 1267 - protein, 497 aa, Artificial Sequence
  Synthetic peptide
EVQLLESGGGLVQPGGSLRLSCAASGFTFSSYAMSWVRQSPGKGLEWVSAISGSGGRAQYAESVQGRFTVSRDNSKNTLYLQMNSLRAEDTAVYYCAKHDYSNYPYFDYWGQGTLVTVSSGGGGSGGGGSGGGGSEIVLTQSPATLSVSPGERATLSCRASQSVSSNLAWYQQKPGQAPRLLIYGSSSRATGIPDRFSGSGSGTDFTLTISRLEPEDFAVYYCQQYGSSPPPFGGGTKVEIKSGGGGSEVQLVESGGGLVQPGGSLKLSCAASGFTFNKYAMNWVRQAPGKGLEWVARIRSKYNNYATYYADSVKDRFTISRDDSKNTAYLQMNNLKTEDTAVYYCVRHGNFGNSYISYWAYWGQGTLVTVSSGGGGSGGGGSGGGGSQTVVTQEPSLTVSPGGTVTLTCGSSTGAVTSGNYPNWVQQKPGQAPRGLIGGTKFLAPGTPARFSGSLLGGKAALTLSGVQPEDEAEYYCVLWYSNRWVFGGGTKLTVL

SEQ ID NO: 1268 - protein, 5 aa, Artificial Sequence
  Synthetic peptide
SYAMS

SEQ ID NO: 1269 - protein, 17 aa, Artificial Sequence
  Synthetic peptide
AISGSGGRTFYAESVEG

SEQ ID NO: 1270 - protein, 11 aa, Artificial Sequence
  Synthetic peptide
HDYSNYPYFDY

SEQ ID NO: 1271 - protein, 12 aa, Artificial Sequence
  Synthetic peptide
RASQGVRSDYLA

SEQ ID NO: 1272 - protein, 7 aa, Artificial Sequence
  Synthetic peptide
GASSRAT

SEQ ID NO: 1273 - protein, 9 aa, Artificial Sequence
  Synthetic peptide
QQYGSTPPT

SEQ ID NO: 1274 - protein, 120 aa, Artificial Sequence
  Synthetic peptide
EVQLLESGGGMVQPGGSLRLSCAASGFTFSSYAMSWVRQAPGKCLEWVSAISGSGGRTFYAESVEGRFTISRDNSKNTLYLQMNSLRAEDTAVYYCTKHDYSNYPYFDYWGQGTLVTVSS

SEQ ID NO: 1275 - protein, 108 aa, Artificial Sequence; identical to SEQ ID NO: 989
  Synthetic peptide

SEQ ID NO: 1276 - protein, 243 aa, Artificial Sequence
  Synthetic peptide
EVQLLESGGGMVQPGGSLRLSCAASGFTFSSYAMSWVRQAPGKCLEWVSAISGSGGRTFYAESVEGRFTISRDNSKNTLYLQMNSLRAEDTAVYYCTKHDYSNYPYFDYWGQGTLVTVSSGGGGSGGGGSGGGGSEIVLTQSPGTLSLSPGERATLSCRASQGVRSDYLAWYQQKPGQAPRLLIYGASSRATGIPDRFSGSGSGTDFTLTISRLEPEDFAVYHCQQYGSTPPTFGCGTKVEIK

SEQ ID NO: 1277 - protein, 498 aa, Artificial Sequence
  Synthetic peptide
EVQLLESGGGMVQPGGSLRLSCAASGFTFSSYAMSWVRQAPGKCLEWVSAISGSGGRTFYAESVEGRFTISRDNSKNTLYLQMNSLRAEDTAVYYCTKHDYSNYPYFDYWGQGTLVTVSSGGGGSGGGGSGGGGSEIVLTQSPGTLSLSPGERATLSCRASQGVRSDYLAWYQQKPGQAPRLLIYGASSRATGIPDRFSGSGSGTDFTLTISRLEPEDFAVYHCQQYGSTPPTFGCGTKVEIKSGGGGSEVQLVESGGGLVQPGGSLKLSCAASGFTFNKYAMNWVRQAPGKGLEWVARIRSKYNNYATYYADSVKDRFTISRDDSKNTAYLQMNNLKTEDTAVYYCVRHGNFGNSYISYWAYWGQGTLVTVSSGGGGSGGGGSGGGGSQTVVTQEPSLTVSPGGTVTLTCGSSTGAVTSGNYPNWVQQKPGQAPRGLIGGTKFLAPGTPARFSGSLLGGKAALTLSGVQPEDEAEYYCVLWYSNRWVFGGGTKLTVL

SEQ ID NO: 1278 - protein, 120 aa, Artificial Sequence
  Synthetic peptide
EVQLLESGGGMVQPGGSLRLSCAASGFTFSSYAMSWVRQAPGKGLEWVSAISGSGGRTFYAESVEGRFTISRDNSKNTLYLQMNSLRAEDTAVYYCTKHDYSNYPYFDYWGQGTLVTVSS

SEQ ID NO: 1279 - protein, 108 aa, Artificial Sequence; identical to SEQ ID NO: 318
  Synthetic peptide

SEQ ID NO: 1280 - protein, 243 aa, Artificial Sequence
  Synthetic peptide
EVQLLESGGGMVQPGGSLRLSCAASGFTFSSYAMSWVRQAPGKGLEWVSAISGSGGRTFYAESVEGRFTISRDNSKNTLYLQMNSLRAEDTAVYYCTKHDYSNYPYFDYWGQGTLVTVSSGGGGSGGGGSGGGGSEIVLTQSPGTLSLSPGERATLSCRASQGVRSDYLAWYQQKPGQAPRLLIYGASSRATGIPDRFSGSGSGTDFTLTISRLEPEDFAVYHCQQYGSTPPTFGGGTKVEIK

SEQ ID NO: 1281 - protein, 498 aa, Artificial Sequence
  Synthetic peptide
EVQLLESGGGMVQPGGSLRLSCAASGFTFSSYAMSWVRQAPGKGLEWVSAISGSGGRTFYAESVEGRFTISRDNSKNTLYLQMNSLRAEDTAVYYCTKHDYSNYPYFDYWGQGTLVTVSSGGGGSGGGGSGGGGSEIVLTQSPGTLSLSPGERATLSCRASQGVRSDYLAWYQQKPGQAPRLLIYGASSRATGIPDRFSGSGSGTDFTLTISRLEPEDFAVYHCQQYGSTPPTFGGGTKVEIKSGGGGSEVQLVESGGGLVQPGGSLKLSCAASGFTFNKYAMNWVRQAPGKGLEWVARIRSKYNNYATYYADSVKDRFTISRDDSKNTAYLQMNNLKTEDTAVYYCVRHGNFGNSYISYWAYWGQGTLVTVSSGGGGSGGGGSGGGGSQTVVTQEPSLTVSPGGTVTLTCGSSTGAVTSGNYPNWVQQKPGQAPRGLIGGTKFLAPGTPARFSGSLLGGKAALTLSGVQPEDEAEYYCVLWYSNRWVFGGGTKLTVL

SEQ ID NO: 1282 - protein, 5 aa, Artificial Sequence
  Synthetic peptide
SYAMS

SEQ ID NO: 1283 - protein, 17 aa, Artificial Sequence
  Synthetic peptide
AIGEGGGYTYYAESVKG

SEQ ID NO: 1284 - protein, 11 aa, Artificial Sequence
  Synthetic peptide
HDYSNYPYFDY

SEQ ID NO: 1285 - protein, 12 aa, Artificial Sequence
  Synthetic peptide
RASQGVRSSYFA

SEQ ID NO: 1286 - protein, 7 aa, Artificial Sequence
  Synthetic peptide
GASTRAT

SEQ ID NO: 1287 - protein, 9 aa, Artificial Sequence
  Synthetic peptide
QQYGSSPPT

SEQ ID NO: 1288 - protein, 119 aa, Artificial Sequence
  Synthetic peptide
EVQLLESGGGLVQPGGSLRLSCAASGFTFSSYAMSWVRQAPGKCLEWVSAIGEGGGYTYYAESVKGRFTISRDNSKNTLSLLMNSLRAEDTAVYYCARHDYSNYPYFDYWGQGTLVTVS

SEQ ID NO: 1289 - protein, 108 aa, Artificial Sequence; identical to SEQ ID NO: 993
  Synthetic peptide

SEQ ID NO: 1290 - protein, 243 aa, Artificial Sequence
  Synthetic peptide
EVQLLESGGGLVQPGGSLRLSCAASGFTFSSYAMSWVRQAPGKCLEWVSAIGEGGGYTYYAESVKGRFTISRDNSKNTLSLLMNSLRAEDTAVYYCARHDYSNYPYFDYWGQGTLVTVSSGGGGSGGGGSGGGGSEIVLTQSPGTLSLSPGERATLSCRASQGVRSSYFAWYQQKPGQAPRLLIYGASTRATGIPARFSGSGSGTDFTLTISRLEPEDFAVYYCQQYGSSPPTFGCGTKVEIK

SEQ ID NO: 1291 - protein, 498 aa, Artificial Sequence
  Synthetic peptide
EVQLLESGGGLVQPGGSLRLSCAASGFTFSSYAMSWVRQAPGKCLEWVSAIGEGGGYTYYAESVKGRFTISRDNSKNTLSLLMNSLRAEDTAVYYCARHDYSNYPYFDYWGQGTLVTVSSGGGGSGGGGSGGGGSEIVLTQSPGTLSLSPGERATLSCRASQGVRSSYFAWYQQKPGQAPRLLIYGASTRATGIPARFSGSGSGTDFTLTISRLEPEDFAVYYCQQYGSSPPTFGCGTKVEIKSGGGGSEVQLVESGGGLVQPGGSLKLSCAASGFTFNKYAMNWVRQAPGKGLEWVARIRSKYNNYATYYADSVKDRFTISRDDSKNTAYLQMNNLKTEDTAVYYCVRHGNFGNSYISYWAYWGQGTLVTVSSGGGGSGGGGSGGGGSQTVVTQEPSLTVSPGGTVTLTCGSSTGAVTSGNYPNWVQQKPGQAPRGLIGGTKFLAPGTPARFSGSLLGGKAALTLSGVQPEDEAEYYCVLWYSNRWVFGGGTKLTVL

SEQ ID NO: 1292 - protein, 120 aa, Artificial Sequence
  Synthetic peptide
EVQLLESGGGLVQPGGSLRLSCAASGFTFSSYAMSWVRQAPGKGLEWVSAIGEGGGYTYYAESVKGRFTISRDNSKNTLSLLMNSLRAEDTAVYYCARHDYSNYPYFDYWGQGTLVTVSS

SEQ ID NO: 1293 - protein, 108 aa, Artificial Sequence; identical to SEQ ID NO: 368
  Synthetic peptide

SEQ ID NO: 1294 - protein, 243 aa, Artificial Sequence
  Synthetic peptide
EVQLLESGGGLVQPGGSLRLSCAASGFTFSSYAMSWVRQAPGKGLEWVSAIGEGGGYTYYAESVKGRFTISRDNSKNTLSLLMNSLRAEDTAVYYCARHDYSNYPYFDYWGQGTLVTVSSGGGGSGGGGSGGGGSEIVLTQSPGTLSLSPGERATLSCRASQGVRSSYFAWYQQKPGQAPRLLIYGASTRATGIPARFSGSGSGTDFTLTISRLEPEDFAVYYCQQYGSSPPTFGQGTKVEIK

SEQ ID NO: 1295 - protein, 498 aa, Artificial Sequence
  Synthetic peptide
EVQLLESGGGLVQPGGSLRLSCAASGFTFSSYAMSWVRQAPGKGLEWVSAIGEGGGYTYYAESVKGRFTISRDNSKNTLSLLMNSLRAEDTAVYYCARHDYSNYPYFDYWGQGTLVTVSSGGGGSGGGGSGGGGSEIVLTQSPGTLSLSPGERATLSCRASQGVRSSYFAWYQQKPGQAPRLLIYGASTRATGIPARFSGSGSGTDFTLTISRLEPEDFAVYYCQQYGSSPPTFGQGTKVEIKSGGGGSEVQLVESGGGLVQPGGSLKLSCAASGFTFNKYAMNWVRQAPGKGLEWVARIRSKYNNYATYYADSVKDRFTISRDDSKNTAYLQMNNLKTEDTAVYYCVRHGNFGNSYISYWAYWGQGTLVTVSSGGGGSGGGGSGGGGSQTVVTQEPSLTVSPGGTVTLTCGSSTGAVTSGNYPNWVQQKPGQAPRGLIGGTKFLAPGTPARFSGSLLGGKAALTLSGVQPEDEAEYYCVLWYSNRWVFGGGTKLTVL

SEQ ID NO: 1296 - protein, 5 aa, Artificial Sequence
  Synthetic peptide
SYAMS

SEQ ID NO: 1297 - protein, 17 aa, Artificial Sequence
  Synthetic peptide
AISGSGGRTFYAESVEG

SEQ ID NO: 1298 - protein, 11 aa, Artificial Sequence
  Synthetic peptide
HDYSNYPYFDY

SEQ ID NO: 1299 - protein, 12 aa, Artificial Sequence
  Synthetic peptide
RASQSIRSNYLA

SEQ ID NO: 1300 - protein, 7 aa, Artificial Sequence
  Synthetic peptide
GASSRAT

SEQ ID NO: 1301 - protein, 9 aa, Artificial Sequence
  Synthetic peptide
QQYGSSPPS

SEQ ID NO: 1302 - protein, 120 aa, Artificial Sequence
  Synthetic peptide
EVQLLESGGGVVQPGRSLRLSCAASGFTFSSYAMSWVRQAPGKCLEWVSAISGSGGRTFYAESVEGRFTISRDNSKNTLYLQMNSLRAEDTAVYYCAKHDYSNYPYFDYWGQGTLVTVSS

SEQ ID NO: 1303 - protein, 108 aa, Artificial Sequence; identical to SEQ ID NO: 997
  Synthetic peptide

SEQ ID NO: 1304 - protein, 243 aa, Artificial Sequence
  Synthetic peptide
EVQLLESGGGVVQPGRSLRLSCAASGFTFSSYAMSWVRQAPGKCLEWVSAISGSGGRTFYAESVEGRFTISRDNSKNTLYLQMNSLRAEDTAVYYCAKHDYSNYPYFDYWGQGTLVTVSSGGGGSGGGGSGGGGSEIVLTQSPGTLSLSPGERATLSCRASQSIRSNYLAWYQQKPGQAPRLLIYGASSRATGIPDRFSGSGSGTDFTLTISRLEPEDFAVYYCQQYGSSPPSFGCGTKVEIK

SEQ ID NO: 1305 - protein, 498 aa, Artificial Sequence
  Synthetic peptide
EVQLLESGGGVVQPGRSLRLSCAASGFTFSSYAMSWVRQAPGKCLEWVSAISGSGGRTFYAESVEGRFTISRDNSKNTLYLQMNSLRAEDTAVYYCAKHDYSNYPYFDYWGQGTLVTVSSGGGGSGGGGSGGGGSEIVLTQSPGTLSLSPGERATLSCRASQSIRSNYLAWYQQKPGQAPRLLIYGASSRATGIPDRFSGSGSGTDFTLTISRLEPEDFAVYYCQQYGSSPPSFGCGTKVEIKSGGGGSEVQLVESGGGLVQPGGSLKLSCAASGFTFNKYAMNWVRQAPGKGLEWVARIRSKYNNYATYYADSVKDRFTISRDDSKNTAYLQMNNLKTEDTAVYYCVRHGNFGNSYISYWAYWGQGTLVTVSSGGGGSGGGGSGGGGSQTVVTQEPSLTVSPGGTVTLTCGSSTGAVTSGNYPNWVQQKPGQAPRGLIGGTKFLAPGTPARFSGSLLGGKAALTLSGVQPEDEAEYYCVLWYSNRWVFGGGTKLTVL

SEQ ID NO: 1306 - protein, 120 aa, Artificial Sequence
  Synthetic peptide
EVQLLESGGGVVQPGRSLRLSCAASGFTFSSYAMSWVRQAPGKGLEWVSAISGSGGRTFYAESVEGRFTISRDNSKNTLYLQMNSLRAEDTAVYYCAKHDYSNYPYFDYWGQGTLVTVSS

SEQ ID NO: 1307 - protein, 108 aa, Artificial Sequence; identical to SEQ ID NO: 378
  Synthetic peptide

SEQ ID NO: 1308 - protein, 243 aa, Artificial Sequence
  Synthetic peptide
EVQLLESGGGVVQPGRSLRLSCAASGFTFSSYAMSWVRQAPGKGLEWVSAISGSGGRTFYAESVEGRFTISRDNSKNTLYLQMNSLRAEDTAVYYCAKHDYSNYPYFDYWGQGTLVTVSSGGGGSGGGGSGGGGSEIVLTQSPGTLSLSPGERATLSCRASQSIRSNYLAWYQQKPGQAPRLLIYGASSRATGIPDRFSGSGSGTDFTLTISRLEPEDFAVYYCQQYGSSPPSFGQGTKVEIK

SEQ ID NO: 1309 - protein, 498 aa, Artificial Sequence
  Synthetic peptide
EVQLLESGGGVVQPGRSLRLSCAASGFTFSSYAMSWVRQAPGKGLEWVSAISGSGGRTFYAESVEGRFTISRDNSKNTLYLQMNSLRAEDTAVYYCAKHDYSNYPYFDYWGQGTLVTVSSGGGGSGGGGSGGGGSEIVLTQSPGTLSLSPGERATLSCRASQSIRSNYLAWYQQKPGQAPRLLIYGASSRATGIPDRFSGSGSGTDFTLTISRLEPEDFAVYYCQQYGSSPPSFGQGTKVEIKSGGGGSEVQLVESGGGLVQPGGSLKLSCAASGFTFNKYAMNWVRQAPGKGLEWVARIRSKYNNYATYYADSVKDRFTISRDDSKNTAYLQMNNLKTEDTAVYYCVRHGNFGNSYISYWAYWGQGTLVTVSSGGGGSGGGGSGGGGSQTVVTQEPSLTVSPGGTVTLTCGSSTGAVTSGNYPNWVQQKPGQAPRGLIGGTKFLAPGTPARFSGSLLGGKAALTLSGVQPEDEAEYYCVLWYSNRWVFGGGTKLTVL

SEQ ID NO: 1310 - protein, 5 aa, Artificial Sequence
  Synthetic peptide
SYAMS

SEQ ID NO: 1311 - protein, 17 aa, Artificial Sequence
  Synthetic peptide
AISGSGGGTFYAESVEG

SEQ ID NO: 1312 - protein, 11 aa, Artificial Sequence
  Synthetic peptide
HDYSNYPYFDY

SEQ ID NO: 1313 - protein, 12 aa, Artificial Sequence
  Synthetic peptide
RASQSVRSSYLA

SEQ ID NO: 1314 - protein, 7 aa, Artificial Sequence
  Synthetic peptide
GASSRAT

SEQ ID NO: 1315 - protein, 9 aa, Artificial Sequence
  Synthetic peptide
QQYGDLPFT

SEQ ID NO: 1316 - protein, 120 aa, Artificial Sequence
  Synthetic peptide
EVQLLESGGGVVQPGRSLRLSCAASGFTFSSYAMSWVRQAPGKCLEWVSAISGSGGGTFYAESVEGRFTISRDNSKNTLYLQMNSLRAEDTAVYYCARHDYSNYPYFDYWGLGTLVTVSS

SEQ ID NO: 1317 - protein, 108 aa, Artificial Sequence; identical to SEQ ID NO: 1001
  Synthetic peptide

SEQ ID NO: 1318 - protein, 243 aa, Artificial Sequence
  Synthetic peptide
EVQLLESGGGVVQPGRSLRLSCAASGFTFSSYAMSWVRQAPGKCLEWVSAISGSGGGTFYAESVEGRFTISRDNSKNTLYLQMNSLRAEDTAVYYCARHDYSNYPYFDYWGLGTLVTVSSGGGGSGGGGSGGGGSEIVLTQSPGTLSLSPGERATLSCRASQSVRSSYLAWYQQKPGQAPRLLIYGASSRATGIPDRFSGSGSGTDFTLTISRLEPEDFAVYSCQQYGDLPFTFGCGTKVEIK

SEQ ID NO: 1319 - protein, 498 aa, Artificial Sequence
  Synthetic peptide
EVQLLESGGGVVQPGRSLRLSCAASGFTFSSYAMSWVRQAPGKCLEWVSAISGSGGGTFYAESVEGRFTISRDNSKNTLYLQMNSLRAEDTAVYYCARHDYSNYPYFDYWGLGTLVTVSSGGGGSGGGGSGGGGSEIVLTQSPGTLSLSPGERATLSCRASQSVRSSYLAWYQQKPGQAPRLLIYGASSRATGIPDRFSGSGSGTDFTLTISRLEPEDFAVYSCQQYGDLPFTFGCGTKVEIKSGGGGSEVQLVESGGGLVQPGGSLKLSCAASGFTFNKYAMNWVRQAPGKGLEWVARIRSKYNNYATYYADSVKDRFTISRDDSKNTAYLQMNNLKTEDTAVYYCVRHGNFGNSYISYWAYWGQGTLVTVSSGGGGSGGGGSGGGGSQTVVTQEPSLTVSPGGTVTLTCGSSTGAVTSGNYPNWVQQKPGQAPRGLIGGTKFLAPGTPARFSGSLLGGKAALTLSGVQPEDEAEYYCVLWYSNRWVFGGGTKLTVL

SEQ ID NO: 1320 - protein, 120 aa, Artificial Sequence
  Synthetic peptide
EVQLLESGGGVVQPGRSLRLSCAASGFTFSSYAMSWVRQAPGKGLEWVSAISGSGGGTFYAESVEGRFTISRDNSKNTLYLQMNSLRAEDTAVYYCARHDYSNYPYFDYWGLGTLVTVSS

SEQ ID NO: 1321 - protein, 108 aa, Artificial Sequence; identical to SEQ ID NO: 388
  Synthetic peptide

SEQ ID NO: 1322 - protein, 243 aa, Artificial Sequence
  Synthetic peptide
EVQLLESGGGVVQPGRSLRLSCAASGFTFSSYAMSWVRQAPGKGLEWVSAISGSGGGTFYAESVEGRFTISRDNSKNTLYLQMNSLRAEDTAVYYCARHDYSNYPYFDYWGLGTLVTVSSGGGGSGGGGSGGGGSEIVLTQSPGTLSLSPGERATLSCRASQSVRSSYLAWYQQKPGQAPRLLIYGASSRATGIPDRFSGSGSGTDFTLTISRLEPEDFAVYSCQQYGDLPFTFGPGTKVEIK

SEQ ID NO: 1323 - protein, 498 aa, Artificial Sequence
  Synthetic peptide
EVQLLESGGGVVQPGRSLRLSCAASGFTFSSYAMSWVRQAPGKGLEWVSAISGSGGGTFYAESVEGRFTISRDNSKNTLYLQMNSLRAEDTAVYYCARHDYSNYPYFDYWGLGTLVTVSSGGGGSGGGGSGGGGSEIVLTQSPGTLSLSPGERATLSCRASQSVRSSYLAWYQQKPGQAPRLLIYGASSRATGIPDRFSGSGSGTDFTLTISRLEPEDFAVYSCQQYGDLPFTFGPGTKVEIKSGGGGSEVQLVESGGGLVQPGGSLKLSCAASGFTFNKYAMNWVRQAPGKGLEWVARIRSKYNNYATYYADSVKDRFTISRDDSKNTAYLQMNNLKTEDTAVYYCVRHGNFGNSYISYWAYWGQGTLVTVSSGGGGSGGGGSGGGGSQTVVTQEPSLTVSPGGTVTLTCGSSTGAVTSGNYPNWVQQKPGQAPRGLIGGTKFLAPGTPARFSGSLLGGKAALTLSGVQPEDEAEYYCVLWYSNRWVFGGGTKLTVL

SEQ ID NO: 1324 - protein, 5 aa, Artificial Sequence
  Synthetic peptide
SYAMS

SEQ ID NO: 1325 - protein, 17 aa, Artificial Sequence
  Synthetic peptide
AISGSGGRTFYAESVEG

SEQ ID NO: 1326 - protein, 11 aa, Artificial Sequence
  Synthetic peptide
HDYSNYPYFDY

SEQ ID NO: 1327 - protein, 12 aa, Artificial Sequence
  Synthetic peptide
RASQSVRSSYLA

SEQ ID NO: 1328 - protein, 7 aa, Artificial Sequence
  Synthetic peptide
GASSRAT

SEQ ID NO: 1329 - protein, 9 aa, Artificial Sequence
  Synthetic peptide
QQYGDLPFT

SEQ ID NO: 1330 - protein, 120 aa, Artificial Sequence; identical to SEQ ID NO: 1274
  Synthetic peptide

SEQ ID NO: 1331 - protein, 108 aa, Artificial Sequence; identical to SEQ ID NO: 1005
  Synthetic peptide

SEQ ID NO: 1332 - protein, 243 aa, Artificial Sequence
  Synthetic peptide
EVQLLESGGGMVQPGGSLRLSCAASGFTFSSYAMSWVRQAPGKCLEWVSAISGSGGRTFYAESVEGRFTISRDNSKNTLYLQMNSLRAEDTAVYYCTKHDYSNYPYFDYWGQGTLVTVSSGGGGSGGGGSGGGGSEIVLTQSPGTLSLSPGERATLSCRASQSVRSSYLAWYQQKPGQAPRLLIYGASSRATGIPDRFSGSGSGTDFTLTISRLEPEDFAVYYCQQYGDLPFTFGCGTKVDIK

SEQ ID NO: 1333 - protein, 498 aa, Artificial Sequence
  Synthetic peptide
EVQLLESGGGMVQPGGSLRLSCAASGFTFSSYAMSWVRQAPGKCLEWVSAISGSGGRTFYAESVEGRFTISRDNSKNTLYLQMNSLRAEDTAVYYCTKHDYSNYPYFDYWGQGTLVTVSSGGGGSGGGGSGGGGSEIVLTQSPGTLSLSPGERATLSCRASQSVRSSYLAWYQQKPGQAPRLLIYGASSRATGIPDRFSGSGSGTDFTLTISRLEPEDFAVYYCQQYGDLPFTFGCGTKVDIKSGGGGSEVQLVESGGGLVQPGGSLKLSCAASGFTFNKYAMNWVRQAPGKGLEWVARIRSKYNNYATYYADSVKDRFTISRDDSKNTAYLQMNNLKTEDTAVYYCVRHGNFGNSYISYWAYWGQGTLVTVSSGGGGSGGGGSGGGGSQTVVTQEPSLTVSPGGTVTLTCGSSTGAVTSGNYPNWVQQKPGQAPRGLIGGTKFLAPGTPARFSGSLLGGKAALTLSGVQPEDEAEYYCVLWYSNRWVFGGGTKLTVL

SEQ ID NO: 1334 - protein, 120 aa, Artificial Sequence; identical to SEQ ID NO: 1278
  Synthetic peptide

SEQ ID NO: 1335 - protein, 108 aa, Artificial Sequence; identical to SEQ ID NO: 408
  Synthetic peptide

SEQ ID NO: 1336 - protein, 243 aa, Artificial Sequence
  Synthetic peptide
EVQLLESGGGMVQPGGSLRLSCAASGFTFSSYAMSWVRQAPGKGLEWVSAISGSGGRTFYAESVEGRFTISRDNSKNTLYLQMNSLRAEDTAVYYCTKHDYSNYPYFDYWGQGTLVTVSSGGGGSGGGGSGGGGSEIVLTQSPGTLSLSPGERATLSCRASQSVRSSYLAWYQQKPGQAPRLLIYGASSRATGIPDRFSGSGSGTDFTLTISRLEPEDFAVYYCQQYGDLPFTFGPGTKVDIK

SEQ ID NO: 1337 - protein, 498 aa, Artificial Sequence
  Synthetic peptide
EVQLLESGGGMVQPGGSLRLSCAASGFTFSSYAMSWVRQAPGKGLEWVSAISGSGGRTFYAESVEGRFTISRDNSKNTLYLQMNSLRAEDTAVYYCTKHDYSNYPYFDYWGQGTLVTVSSGGGGSGGGGSGGGGSEIVLTQSPGTLSLSPGERATLSCRASQSVRSSYLAWYQQKPGQAPRLLIYGASSRATGIPDRFSGSGSGTDFTLTISRLEPEDFAVYYCQQYGDLPFTFGPGTKVDIKSGGGGSEVQLVESGGGLVQPGGSLKLSCAASGFTFNKYAMNWVRQAPGKGLEWVARIRSKYNNYATYYADSVKDRFTISRDDSKNTAYLQMNNLKTEDTAVYYCVRHGNFGNSYISYWAYWGQGTLVTVSSGGGGSGGGGSGGGGSQTVVTQEPSLTVSPGGTVTLTCGSSTGAVTSGNYPNWVQQKPGQAPRGLIGGTKFLAPGTPARFSGSLLGGKAALTLSGVQPEDEAEYYCVLWYSNRWVFGGGTKLTVL

SEQ ID NO: 1338 - protein, 5 aa, Artificial Sequence
  Synthetic peptide
TYAMS

SEQ ID NO: 1339 - protein, 17 aa, Artificial Sequence
  Synthetic peptide
LISGSGGRTYYAESVKG

SEQ ID NO: 1340 - protein, 11 aa, Artificial Sequence
  Synthetic peptide
HDYSNYPYFDY

SEQ ID NO: 1341 - protein, 12 aa, Artificial Sequence
  Synthetic peptide
RASQGVRSSYLA

SEQ ID NO: 1342 - protein, 7 aa, Artificial Sequence
  Synthetic peptide
GASSRAT

SEQ ID NO: 1343 - protein, 9 aa, Artificial Sequence
  Synthetic peptide
QQYGSSPPT

SEQ ID NO: 1344 - protein, 120 aa, Artificial Sequence; identical to SEQ ID NO: 1246
  Synthetic peptide

SEQ ID NO: 1345 - protein, 108 aa, Artificial Sequence; identical to SEQ ID NO: 1009
  Synthetic peptide

SEQ ID NO: 1346 - protein, 243 aa, Artificial Sequence
  Synthetic peptide
EVQLLESGGGLVQPGGSLRLSCAASGFTFSTYAMSWVRQAPGKCLEWVSLISGSGGRTYYAESVKGRFTISRDNSKNTLYLQMNSLRAEDTAVYYCAKHDYSNYPYFDYWGQGTLVTVSSGGGGSGGGGSGGGGSEIVLTQSPGTLSLSPGERATLSCRASQGVRSSYLAWYQQKPGQAPRLLIYGASSRATGIPDRFSGSGSGTDFTLTINRLEPEDFAVYYCQQYGSSPPTFGCGTKVDIK

SEQ ID NO: 1347 - protein, 498 aa, Artificial Sequence
  Synthetic peptide
EVQLLESGGGLVQPGGSLRLSCAASGFTFSTYAMSWVRQAPGKCLEWVSLISGSGGRTYYAESVKGRFTISRDNSKNTLYLQMNSLRAEDTAVYYCAKHDYSNYPYFDYWGQGTLVTVSSGGGGSGGGGSGGGGSEIVLTQSPGTLSLSPGERATLSCRASQGVRSSYLAWYQQKPGQAPRLLIYGASSRATGIPDRFSGSGSGTDFTLTINRLEPEDFAVYYCQQYGSSPPTFGCGTKVDIKSGGGGSEVQLVESGGGLVQPGGSLKLSCAASGFTFNKYAMNWVRQAPGKGLEWVARIRSKYNNYATYYADSVKDRFTISRDDSKNTAYLQMNNLKTEDTAVYYCVRHGNFGNSYISYWAYWGQGTLVTVSSGGGGSGGGGSGGGGSQTVVTQEPSLTVSPGGTVTLTCGSSTGAVTSGNYPNWVQQKPGQAPRGLIGGTKFLAPGTPARFSGSLLGGKAALTLSGVQPEDEAEYYCVLWYSNRWVFGGGTKLTVL

SEQ ID NO: 1348 - protein, 120 aa, Artificial Sequence; identical to SEQ ID NO: 1250
  Synthetic peptide

SEQ ID NO: 1349 - protein, 108 aa, Artificial Sequence; identical to SEQ ID NO: 418
  Synthetic peptide

SEQ ID NO: 1350 - protein, 243 aa, Artificial Sequence
  Synthetic peptide
EVQLLESGGGLVQPGGSLRLSCAASGFTFSTYAMSWVRQAPGKGLEWVSLISGSGGRTYYAESVKGRFTISRDNSKNTLYLQMNSLRAEDTAVYYCAKHDYSNYPYFDYWGQGTLVTVSSGGGGSGGGGSGGGGSEIVLTQSPGTLSLSPGERATLSCRASQGVRSSYLAWYQQKPGQAPRLLIYGASSRATGIPDRFSGSGSGTDFTLTINRLEPEDFAVYYCQQYGSSPPTFGGGTKVDIK

SEQ ID NO: 1351 - protein, 498 aa, Artificial Sequence
  Synthetic peptide
EVQLLESGGGLVQPGGSLRLSCAASGFTFSTYAMSWVRQAPGKGLEWVSLISGSGGRTYYAESVKGRFTISRDNSKNTLYLQMNSLRAEDTAVYYCAKHDYSNYPYFDYWGQGTLVTVSSGGGGSGGGGSGGGGSEIVLTQSPGTLSLSPGERATLSCRASQGVRSSYLAWYQQKPGQAPRLLIYGASSRATGIPDRFSGSGSGTDFTLTINRLEPEDFAVYYCQQYGSSPPTFGGGTKVDIKSGGGGSEVQLVESGGGLVQPGGSLKLSCAASGFTFNKYAMNWVRQAPGKGLEWVARIRSKYNNYATYYADSVKDRFTISRDDSKNTAYLQMNNLKTEDTAVYYCVRHGNFGNSYISYWAYWGQGTLVTVSSGGGGSGGGGSGGGGSQTVVTQEPSLTVSPGGTVTLTCGSSTGAVTSGNYPNWVQQKPGQAPRGLIGGTKFLAPGTPARFSGSLLGGKAALTLSGVQPEDEAEYYCVLWYSNRWVFGGGTKLTVL

SEQ ID NO: 1352 - protein, 5 aa, Artificial Sequence
  Synthetic peptide
SYAMS

SEQ ID NO: 1353 - protein, 17 aa, Artificial Sequence
  Synthetic peptide
AISGSGGRTFYAESVEG

SEQ ID NO: 1354 - protein, 11 aa, Artificial Sequence
  Synthetic peptide
HDYSNYPYFDY

SEQ ID NO: 1355 - protein, 12 aa, Artificial Sequence
  Synthetic peptide
RASQSVRSNYLA

SEQ ID NO: 1356 - protein, 7 aa, Artificial Sequence
  Synthetic peptide
GASSRAT

SEQ ID NO: 1357 - protein, 9 aa, Artificial Sequence
  Synthetic peptide
QQYGSSPPT

SEQ ID NO: 1358 - protein, 120 aa, Artificial Sequence; identical to SEQ ID NO: 1302
  Synthetic peptide

SEQ ID NO: 1359 - protein, 108 aa, Artificial Sequence; identical to SEQ ID NO: 1013
  Synthetic peptide

SEQ ID NO: 1360 - protein, 243 aa, Artificial Sequence
  Synthetic peptide
EVQLLESGGGVVQPGRSLRLSCAASGFTFSSYAMSWVRQAPGKCLEWVSAISGSGGRTFYAESVEGRFTISRDNSKNTLYLQMNSLRAEDTAVYYCAKHDYSNYPYFDYWGQGTLVTVSSGGGGSGGGGSGGGGSEIVLTQSPGTLSLSPGERATLSCRASQSVRSNYLAWYQQKPGQAPRLLIYGASSRATGIPDRFSGSGSGTDFTLTINRLEPEDFAVYYCQQYGSSPPTFGCGTKVDIK

SEQ ID NO: 1361 - protein, 498 aa, Artificial Sequence
  Synthetic peptide
EVQLLESGGGVVQPGRSLRLSCAASGFTFSSYAMSWVRQAPGKCLEWVSAISGSGGRTFYAESVEGRFTISRDNSKNTLYLQMNSLRAEDTAVYYCAKHDYSNYPYFDYWGQGTLVTVSSGGGGSGGGGSGGGGSEIVLTQSPGTLSLSPGERATLSCRASQSVRSNYLAWYQQKPGQAPRLLIYGASSRATGIPDRFSGSGSGTDFTLTINRLEPEDFAVYYCQQYGSSPPTFGCGTKVDIKSGGGGSEVQLVESGGGLVQPGGSLKLSCAASGFTFNKYAMNWVRQAPGKGLEWVARIRSKYNNYATYYADSVKDRFTISRDDSKNTAYLQMNNLKTEDTAVYYCVRHGNFGNSYISYWAYWGQGTLVTVSSGGGGSGGGGSGGGGSQTVVTQEPSLTVSPGGTVTLTCGSSTGAVTSGNYPNWVQQKPGQAPRGLIGGTKFLAPGTPARFSGSLLGGKAALTLSGVQPEDEAEYYCVLWYSNRWVFGGGTKLTVL

SEQ ID NO: 1362 - protein, 120 aa, Artificial Sequence; identical to SEQ ID NO: 1306
  Synthetic peptide

SEQ ID NO: 1363 - protein, 108 aa, Artificial Sequence; identical to SEQ ID NO: 428
  Synthetic peptide

SEQ ID NO: 1364 - protein, 243 aa, Artificial Sequence
  Synthetic peptide
EVQLLESGGGVVQPGRSLRLSCAASGFTFSSYAMSWVRQAPGKGLEWVSAISGSGGRTFYAESVEGRFTISRDNSKNTLYLQMNSLRAEDTAVYYCAKHDYSNYPYFDYWGQGTLVTVSSGGGGSGGGGSGGGGSEIVLTQSPGTLSLSPGERATLSCRASQSVRSNYLAWYQQKPGQAPRLLIYGASSRATGIPDRFSGSGSGTDFTLTINRLEPEDFAVYYCQQYGSSPPTFGGGTKVDIK

SEQ ID NO: 1365 - protein, 498 aa, Artificial Sequence
  Synthetic peptide
EVQLLESGGGVVQPGRSLRLSCAASGFTFSSYAMSWVRQAPGKGLEWVSAISGSGGRTFYAESVEGRFTISRDNSKNTLYLQMNSLRAEDTAVYYCAKHDYSNYPYFDYWGQGTLVTVSSGGGGSGGGGSGGGGSEIVLTQSPGTLSLSPGERATLSCRASQSVRSNYLAWYQQKPGQAPRLLIYGASSRATGIPDRFSGSGSGTDFTLTINRLEPEDFAVYYCQQYGSSPPTFGGGTKVDIKSGGGGSEVQLVESGGGLVQPGGSLKLSCAASGFTFNKYAMNWVRQAPGKGLEWVARIRSKYNNYATYYADSVKDRFTISRDDSKNTAYLQMNNLKTEDTAVYYCVRHGNFGNSYISYWAYWGQGTLVTVSSGGGGSGGGGSGGGGSQTVVTQEPSLTVSPGGTVTLTCGSSTGAVTSGNYPNWVQQKPGQAPRGLIGGTKFLAPGTPARFSGSLLGGKAALTLSGVQPEDEAEYYCVLWYSNRWVFGGGTKLTVL

SEQ ID NO: 1366 - protein, 5 aa, Artificial Sequence
  Synthetic peptide
SYAMS

SEQ ID NO: 1367 - protein, 17 aa, Artificial Sequence
  Synthetic peptide
VISGSGGITDFAESVKG

SEQ ID NO: 1368 - protein, 11 aa, Artificial Sequence
  Synthetic peptide
HDYSNYFFFDY

SEQ ID NO: 1369 - protein, 11 aa, Artificial Sequence
  Synthetic peptide
RASQGISNYLA

SEQ ID NO: 1370 - protein, 7 aa, Artificial Sequence
  Synthetic peptide
AASILQS

SEQ ID NO: 1371 - protein, 9 aa, Artificial Sequence
  Synthetic peptide
QQYFAYPIT

SEQ ID NO: 1372 - protein, 120 aa, Artificial Sequence
  Synthetic peptide
EVQLLESGGGLVQPGGSLRLSCAASGFTFSSYAMSWVRQAPGKCLEWVSVISGSGGITDFAESVKGRFTISRDNSRNTLYLQMNSLRAEDTAVYFCARHDYSNYFFFDYWGQGTLVTVSS

SEQ ID NO: 1373 - protein, 107 aa, Artificial Sequence; identical to SEQ ID NO: 678
  Synthetic peptide

SEQ ID NO: 1374 - protein, 242 aa, Artificial Sequence
  Synthetic peptide
EVQLLESGGGLVQPGGSLRLSCAASGFTFSSYAMSWVRQAPGKCLEWVSVISGSGGITDFAESVKGRFTISRDNSRNTLYLQMNSLRAEDTAVYFCARHDYSNYFFFDYWGQGTLVTVSSGGGGSGGGGSGGGGSDIQMTQSPSSLSASVGDRVTITCRASQGISNYLAWYQQKPGKVPKLLIYAASILQSGVPSKFSGSGSGTDFTLTISSLQPEDFAIYYCQQYFAYPITFGCGTRLEIK

SEQ ID NO: 1375 - protein, 497 aa, Artificial Sequence
  Synthetic peptide
EVQLLESGGGLVQPGGSLRLSCAASGFTFSSYAMSWVRQAPGKCLEWVSVISGSGGITDFAESVKGRFTISRDNSRNTLYLQMNSLRAEDTAVYFCARHDYSNYFFFDYWGQGTLVTVSSGGGGSGGGGSGGGGSDIQMTQSPSSLSASVGDRVTITCRASQGISNYLAWYQQKPGKVPKLLIYAASILQSGVPSKFSGSGSGTDFTLTISSLQPEDFAIYYCQQYFAYPITFGCGTRLEIKSGGGGSEVQLVESGGGLVQPGGSLKLSCAASGFTFNKYAMNWVRQAPGKGLEWVARIRSKYNNYATYYADSVKDRFTISRDDSKNTAYLQMNNLKTEDTAVYYCVRHGNFGNSYISYWAYWGQGTLVTVSSGGGGSGGGGSGGGGSQTVVTQEPSLTVSPGGTVTLTCGSSTGAVTSGNYPNWVQQKPGQAPRGLIGGTKFLAPGTPARFSGSLLGGKAALTLSGVQPEDEAEYYCVLWYSNRWVFGGGTKLTVL

SEQ ID NO: 1376 - protein, 120 aa, Artificial Sequence
  Synthetic peptide
EVQLLESGGGLVQPGGSLRLSCAASGFTFSSYAMSWVRQAPGKGLEWVSVISGSGGITDFAESVKGRFTISRDNSRNTLYLQMNSLRAEDTAVYFCARHDYSNYFFFDYWGQGTLVTVSS

SEQ ID NO: 1377 - protein, 107 aa, Artificial Sequence; identical to SEQ ID NO: 478
  Synthetic peptide

SEQ ID NO: 1378 - protein, 242 aa, Artificial Sequence
  Synthetic peptide
EVQLLESGGGLVQPGGSLRLSCAASGFTFSSYAMSWVRQAPGKGLEWVSVISGSGGITDFAESVKGRFTISRDNSRNTLYLQMNSLRAEDTAVYFCARHDYSNYFFFDYWGQGTLVTVSSGGGGSGGGGSGGGGSDIQMTQSPSSLSASVGDRVTITCRASQGISNYLAWYQQKPGKVPKLLIYAASILQSGVPSKFSGSGSGTDFTLTISSLQPEDFAIYYCQQYFAYPITFGQGTRLEIK

SEQ ID NO: 1379 - protein, 497 aa, Artificial Sequence
  Synthetic peptide
EVQLLESGGGLVQPGGSLRLSCAASGFTFSSYAMSWVRQAPGKGLEWVSVISGSGGITDFAESVKGRFTISRDNSRNTLYLQMNSLRAEDTAVYFCARHDYSNYFFFDYWGQGTLVTVSSGGGGSGGGGSGGGGSDIQMTQSPSSLSASVGDRVTITCRASQGISNYLAWYQQKPGKVPKLLIYAASILQSGVPSKFSGSGSGTDFTLTISSLQPEDFAIYYCQQYFAYPITFGQGTRLEIKSGGGGSEVQLVESGGGLVQPGGSLKLSCAASGFTFNKYAMNWVRQAPGKGLEWVARIRSKYNNYATYYADSVKDRFTISRDDSKNTAYLQMNNLKTEDTAVYYCVRHGNFGNSYISYWAYWGQGTLVTVSSGGGGSGGGGSGGGGSQTVVTQEPSLTVSPGGTVTLTCGSSTGAVTSGNYPNWVQQKPGQAPRGLIGGTKFLAPGTPARFSGSLLGGKAALTLSGVQPEDEAEYYCVLWYSNRWVFGGGTKLTVL

SEQ ID NO: 1380 - protein, 5 aa, Artificial Sequence
  Synthetic peptide
SYAMS

SEQ ID NO: 1381 - protein, 17 aa, Artificial Sequence
  Synthetic peptide
AISGSGGRTFYAESVEG

SEQ ID NO: 1382 - protein, 11 aa, Artificial Sequence
  Synthetic peptide
HDYSNYPYFDY

SEQ ID NO: 1383 - protein, 12 aa, Artificial Sequence
  Synthetic peptide
RASQSVRSSYLA

SEQ ID NO: 1384 - protein, 7 aa, Artificial Sequence
  Synthetic peptide
GASSRAT

SEQ ID NO: 1385 - protein, 9 aa, Artificial Sequence
  Synthetic peptide
QQYGSSPPT

SEQ ID NO: 1386 - protein, 120 aa, Artificial Sequence; identical to SEQ ID NO: 1092
  Synthetic peptide

SEQ ID NO: 1387 - protein, 108 aa, Artificial Sequence; identical to SEQ ID NO: 1021
  Synthetic peptide

SEQ ID NO: 1388 - protein, 243 aa, Artificial Sequence
  Synthetic peptide
EVQLLESGGGMVQPGGSLRLSCAASGFTFSSYAMSWVRQAPGKCLEWVSAISGSGGRTFYAESVEGRFTISRDNSKNTLYLQMNSLRAEDTAVYYCAKHDYSNYPYFDYWGQGTLVTVSSGGGGSGGGGSGGGGSEIVLTQSPGTLSLSPGERATLSCRASQSVRSSYLAWYQQKPGQAPRLLIYGASSRATGIPDRFSGSGSGTDFTLTISRLEPEDFAVYFCQQYGSSPPTFGCGTRLEIK

SEQ ID NO: 1389 - protein, 498 aa, Artificial Sequence
  Synthetic peptide
EVQLLESGGGMVQPGGSLRLSCAASGFTFSSYAMSWVRQAPGKCLEWVSAISGSGGRTFYAESVEGRFTISRDNSKNTLYLQMNSLRAEDTAVYYCAKHDYSNYPYFDYWGQGTLVTVSSGGGGSGGGGSGGGGSEIVLTQSPGTLSLSPGERATLSCRASQSVRSSYLAWYQQKPGQAPRLLIYGASSRATGIPDRFSGSGSGTDFTLTISRLEPEDFAVYFCQQYGSSPPTFGCGTRLEIKSGGGGSEVQLVESGGGLVQPGGSLKLSCAASGFTFNKYAMNWVRQAPGKGLEWVARIRSKYNNYATYYADSVKDRFTISRDDSKNTAYLQMNNLKTEDTAVYYCVRHGNFGNSYISYWAYWGQGTLVTVSSGGGGSGGGGSGGGGSQTVVTQEPSLTVSPGGTVTLTCGSSTGAVTSGNYPNWVQQKPGQAPRGLIGGTKFLAPGTPARFSGSLLGGKAALTLSGVQPEDEAEYYCVLWYSNRWVFGGGTKLTVL

SEQ ID NO: 1390 - protein, 120 aa, Artificial Sequence; identical to SEQ ID NO: 1096
  Synthetic peptide

SEQ ID NO: 1391 - protein, 108 aa, Artificial Sequence; identical to SEQ ID NO: 528
  Synthetic peptide

SEQ ID NO: 1392 - protein, 243 aa, Artificial Sequence
  Synthetic peptide
EVQLLESGGGMVQPGGSLRLSCAASGFTFSSYAMSWVRQAPGKGLEWVSAISGSGGRTFYAESVEGRFTISRDNSKNTLYLQMNSLRAEDTAVYYCAKHDYSNYPYFDYWGQGTLVTVSSGGGGSGGGGSGGGGSEIVLTQSPGTLSLSPGERATLSCRASQSVRSSYLAWYQQKPGQAPRLLIYGASSRATGIPDRFSGSGSGTDFTLTISRLEPEDFAVYFCQQYGSSPPTFGGGTRLEIK

SEQ ID NO: 1393 - protein, 498 aa, Artificial Sequence
  Synthetic peptide
EVQLLESGGGMVQPGGSLRLSCAASGFTFSSYAMSWVRQAPGKGLEWVSAISGSGGRTFYAESVEGRFTISRDNSKNTLYLQMNSLRAEDTAVYYCAKHDYSNYPYFDYWGQGTLVTVSSGGGGSGGGGSGGGGSEIVLTQSPGTLSLSPGERATLSCRASQSVRSSYLAWYQQKPGQAPRLLIYGASSRATGIPDRFSGSGSGTDFTLTISRLEPEDFAVYFCQQYGSSPPTFGGGTRLEIKSGGGGSEVQLVESGGGLVQPGGSLKLSCAASGFTFNKYAMNWVRQAPGKGLEWVARIRSKYNNYATYYADSVKDRFTISRDDSKNTAYLQMNNLKTEDTAVYYCVRHGNFGNSYISYWAYWGQGTLVTVSSGGGGSGGGGSGGGGSQTVVTQEPSLTVSPGGTVTLTCGSSTGAVTSGNYPNWVQQKPGQAPRGLIGGTKFLAPGTPARFSGSLLGGKAALTLSGVQPEDEAEYYCVLWYSNRWVFGGGTKLTVL

SEQ ID NO: 1394 - protein, 5 aa, Artificial Sequence
  Synthetic peptide
IYAMS

SEQ ID NO: 1395 - protein, 17 aa, Artificial Sequence
  Synthetic peptide
AIGGSGGSTFYAESVKG

SEQ ID NO: 1396 - protein, 11 aa, Artificial Sequence
  Synthetic peptide
HDYSNYPYFDY

SEQ ID NO: 1397 - protein, 12 aa, Artificial Sequence
  Synthetic peptide
RASQSVRSSYVA

SEQ ID NO: 1398 - protein, 7 aa, Artificial Sequence
  Synthetic peptide
GASSRAT

SEQ ID NO: 1399 - protein, 9 aa, Artificial Sequence
  Synthetic peptide
QQYGDLPFT

SEQ ID NO: 1400 - protein, 120 aa, Artificial Sequence
  Synthetic peptide
EVQLLESGGGLVQPGGSLRLSCAASGFTFSIYAMSWVRQAPGKCLEWVSAIGGSGGSTFYAESVKGRFTISRDNSKNTLYLQMNSLRAEDTAVYYCAKHDYSNYPYFDYWGQGTLVTVSS

SEQ ID NO: 1401 - protein, 108 aa, Artificial Sequence; identical to SEQ ID NO: 1025
  Synthetic peptide

SEQ ID NO: 1402 - protein, 243 aa, Artificial Sequence
  Synthetic peptide
EVQLLESGGGLVQPGGSLRLSCAASGFTFSIYAMSWVRQAPGKCLEWVSAIGGSGGSTFYAESVKGRFTISRDNSKNTLYLQMNSLRAEDTAVYYCAKHDYSNYPYFDYWGQGTLVTVSSGGGGSGGGGSGGGGSEIVLTQSPGTLSLSPGERATLSCRASQSVRSSYVAWYQQKPGQAPRLLIYGASSRATGIPDRFSGSGSGTDFTLTISRLEPEDFAVYYCQQYGDLPFTFGCGTRLEIK

SEQ ID NO: 1403 - protein, 498 aa, Artificial Sequence
  Synthetic peptide
EVQLLESGGGLVQPGGSLRLSCAASGFTFSIYAMSWVRQAPGKCLEWVSAIGGSGGSTFYAESVKGRFTISRDNSKNTLYLQMNSLRAEDTAVYYCAKHDYSNYPYFDYWGQGTLVTVSSGGGGSGGGGSGGGGSEIVLTQSPGTLSLSPGERATLSCRASQSVRSSYVAWYQQKPGQAPRLLIYGASSRATGIPDRFSGSGSGTDFTLTISRLEPEDFAVYYCQQYGDLPFTFGCGTRLEIKSGGGGSEVQLVESGGGLVQPGGSLKLSCAASGFTFNKYAMNWVRQAPGKGLEWVARIRSKYNNYATYYADSVKDRFTISRDDSKNTAYLQMNNLKTEDTAVYYCVRHGNFGNSYISYWAYWGQGTLVTVSSGGGGSGGGGSGGGGSQTVVTQEPSLTVSPGGTVTLTCGSSTGAVTSGNYPNWVQQKPGQAPRGLIGGTKFLAPGTPARFSGSLLGGKAALTLSGVQPEDEAEYYCVLWYSNRWVFGGGTKLTVL

SEQ ID NO: 1404 - protein, 120 aa, Artificial Sequence
  Synthetic peptide
EVQLLESGGGLVQPGGSLRLSCAASGFTFSIYAMSWVRQAPGKGLEWVSAIGGSGGSTFYAESVKGRFTISRDNSKNTLYLQMNSLRAEDTAVYYCAKHDYSNYPYFDYWGQGTLVTVSS

SEQ ID NO: 1405 - protein, 108 aa, Artificial Sequence; identical to SEQ ID NO: 538
  Synthetic peptide

SEQ ID NO: 1406 - protein, 243 aa, Artificial Sequence
  Synthetic peptide
EVQLLESGGGLVQPGGSLRLSCAASGFTFSIYAMSWVRQAPGKGLEWVSAIGGSGGSTFYAESVKGRFTISRDNSKNTLYLQMNSLRAEDTAVYYCAKHDYSNYPYFDYWGQGTLVTVSSGGGGSGGGGSGGGGSEIVLTQSPGTLSLSPGERATLSCRASQSVRSSYVAWYQQKPGQAPRLLIYGASSRATGIPDRFSGSGSGTDFTLTISRLEPEDFAVYYCQQYGDLPFTFGPGTRLEIK

SEQ ID NO: 1407 - protein, 498 aa, Artificial Sequence
  Synthetic peptide
EVQLLESGGGLVQPGGSLRLSCAASGFTFSIYAMSWVRQAPGKGLEWVSAIGGSGGSTFYAESVKGRFTISRDNSKNTLYLQMNSLRAEDTAVYYCAKHDYSNYPYFDYWGQGTLVTVSSGGGGSGGGGSGGGGSEIVLTQSPGTLSLSPGERATLSCRASQSVRSSYVAWYQQKPGQAPRLLIYGASSRATGIPDRFSGSGSGTDFTLTISRLEPEDFAVYYCQQYGDLPFTFGPGTRLEIKSGGGGSEVQLVESGGGLVQPGGSLKLSCAASGFTFNKYAMNWVRQAPGKGLEWVARIRSKYNNYATYYADSVKDRFTISRDDSKNTAYLQMNNLKTEDTAVYYCVRHGNFGNSYISYWAYWGQGTLVTVSSGGGGSGGGGSGGGGSQTVVTQEPSLTVSPGGTVTLTCGSSTGAVTSGNYPNWVQQKPGQAPRGLIGGTKFLAPGTPARFSGSLLGGKAALTLSGVQPEDEAEYYCVLWYSNRWVFGGGTKLTVL

SEQ ID NO: 1408 - protein, 7 aa, Artificial Sequence
  Synthetic peptide
SSSYYWG

SEQ ID NO: 1409 - protein, 16 aa, Artificial Sequence
  Synthetic peptide
SIYHSGGTYFNPSLKS

SEQ ID NO: 1410 - protein, 15 aa, Artificial Sequence
  Synthetic peptide
HYEILTGYYPDVFDI

SEQ ID NO: 1411 - protein, 11 aa, Artificial Sequence
  Synthetic peptide
RASQSISSYLN

SEQ ID NO: 1412 - protein, 7 aa, Artificial Sequence
  Synthetic peptide
AASNLQS

SEQ ID NO: 1413 - protein, 9 aa, Artificial Sequence
  Synthetic peptide
QQSFSSPRT

SEQ ID NO: 1414 - protein, 125 aa, Artificial Sequence; identical to SEQ ID NO: 1028
  Synthetic peptide

SEQ ID NO: 1415 - protein, 107 aa, Artificial Sequence; identical to SEQ ID NO: 1029
  Synthetic peptide

SEQ ID NO: 1416 - protein, 247 aa, Artificial Sequence; identical to SEQ ID NO: 1030
  Synthetic peptide

SEQ ID NO: 1417 - protein, 502 aa, Artificial Sequence; identical to SEQ ID NO: 1031
  Synthetic peptide

SEQ ID NO: 1418 - protein, 125 aa, Artificial Sequence; identical to SEQ ID NO: 577
  Synthetic peptide

SEQ ID NO: 1419 - protein, 107 aa, Artificial Sequence; identical to SEQ ID NO: 578
  Synthetic peptide

SEQ ID NO: 1420 - protein, 247 aa, Artificial Sequence; identical to SEQ ID NO: 579
  Synthetic peptide

SEQ ID NO: 1421 - protein, 502 aa, Artificial Sequence [sequence omitted]

SEQ ID NO: 1422 - protein, 5 aa, Artificial Sequence
  Synthetic peptide
SYSMN

SEQ ID NO: 1423 - protein, 17 aa, Artificial Sequence
  Synthetic peptide
YISSSGGYIYYAESVKG

SEQ ID NO: 1424 - protein, 11 aa, Artificial Sequence
  Synthetic peptide
GDYSNYAYFDY

SEQ ID NO: 1425 - protein, 11 aa, Artificial Sequence
  Synthetic peptide
RASQGISNYLA

SEQ ID NO: 1426 - protein, 7 aa, Artificial Sequence
  Synthetic peptide
AASTLQS

SEQ ID NO: 1427 - protein, 9 aa, Artificial Sequence
  Synthetic peptide
QQYYSTPLT

SEQ ID NO: 1428 - protein, 120 aa, Artificial Sequence
  Synthetic peptide
EVQLVESGGGLVKPGGSLRLSCAASGFTFSSYSMNWVRQAPGKCLEWVSYISSSGGYIYYAESVKGRFTISRDNAKNSLYLQMNSLRAEDAAVYYCSRGDYSNYAYFDYWGQGTLVTVSS

SEQ ID NO: 1429 - protein, 107 aa, Artificial Sequence; identical to SEQ ID NO: 728
  Synthetic peptide

SEQ ID NO: 1430 - protein, 242 aa, Artificial Sequence
  Synthetic peptide
EVQLVESGGGLVKPGGSLRLSCAASGFTFSSYSMNWVRQAPGKCLEWVSYISSSGGYIYYAESVKGRFTISRDNAKNSLYLQMNSLRAEDAAVYYCSRGDYSNYAYFDYWGQGTLVTVSSGGGGSGGGGSGGGGSDIQMTQSPSSLSASVGDRVTITCRASQGISNYLAWYQQKPGKVPKLLIYAASTLQSGVPSRFSGSGSGTDFTLTISSLQAEDVAVYYCQQYYSTPLTFGCGTKVEIK

SEQ ID NO: 1431 - protein, 497 aa, Artificial Sequence
  Synthetic peptide
EVQLVESGGGLVKPGGSLRLSCAASGFTFSSYSMNWVRQAPGKCLEWVSYISSSGGYIYYAESVKGRFTISRDNAKNSLYLQMNSLRAEDAAVYYCSRGDYSNYAYFDYWGQGTLVTVSSGGGGSGGGGSGGGGSDIQMTQSPSSLSASVGDRVTITCRASQGISNYLAWYQQKPGKVPKLLIYAASTLQSGVPSRFSGSGSGTDFTLTISSLQAEDVAVYYCQQYYSTPLTFGCGTKVEIKSGGGGSEVQLVESGGGLVQPGGSLKLSCAASGFTFNKYAMNWVRQAPGKGLEWVARIRSKYNNYATYYADSVKDRFTISRDDSKNTAYLQMNNLKTEDTAVYYCVRHGNFGNSYISYWAYWGQGTLVTVSSGGGGSGGGGSGGGGSQTVVTQEPSLTVSPGGTVTLTCGSSTGAVTSGNYPNWVQQKPGQAPRGLIGGTKFLAPGTPARFSGSLLGGKAALTLSGVQPEDEAEYYCVLWYSNRWVFGGGTKLTVL

SEQ ID NO: 1432 - protein, 120 aa, Artificial Sequence
  Synthetic peptide
EVQLVESGGGLVKPGGSLRLSCAASGFTFSSYSMNWVRQAPGKGLEWVSYISSSGGYIYYAESVKGRFTISRDNAKNSLYLQMNSLRAEDAAVYYCSRGDYSNYAYFDYWGQGTLVTVSS

SEQ ID NO: 1433 - protein, 107 aa, Artificial Sequence; identical to SEQ ID NO: 618
  Synthetic peptide

SEQ ID NO: 1434 - protein, 242 aa, Artificial Sequence
  Synthetic peptide
EVQLVESGGGLVKPGGSLRLSCAASGFTFSSYSMNWVRQAPGKGLEWVSYISSSGGYIYYAESVKGRFTISRDNAKNSLYLQMNSLRAEDAAVYYCSRGDYSNYAYFDYWGQGTLVTVSSGGGGSGGGGSGGGGSDIQMTQSPSSLSASVGDRVTITCRASQGISNYLAWYQQKPGKVPKLLIYAASTLQSGVPSRFSGSGSGTDFTLTISSLQAEDVAVYYCQQYYSTPLTFGGGTKVEIK

SEQ ID NO: 1435 - protein, 497 aa, Artificial Sequence
  Synthetic peptide
EVQLVESGGGLVKPGGSLRLSCAASGFTFSSYSMNWVRQAPGKGLEWVSYISSSGGYIYYAESVKGRFTISRDNAKNSLYLQMNSLRAEDAAVYYCSRGDYSNYAYFDYWGQGTLVTVSSGGGGSGGGGSGGGGSDIQMTQSPSSLSASVGDRVTITCRASQGISNYLAWYQQKPGKVPKLLIYAASTLQSGVPSRFSGSGSGTDFTLTISSLQAEDVAVYYCQQYYSTPLTFGGGTKVEIKSGGGGSEVQLVESGGGLVQPGGSLKLSCAASGFTFNKYAMNWVRQAPGKGLEWVARIRSKYNNYATYYADSVKDRFTISRDDSKNTAYLQMNNLKTEDTAVYYCVRHGNFGNSYISYWAYWGQGTLVTVSSGGGGSGGGGSGGGGSQTVVTQEPSLTVSPGGTVTLTCGSSTGAVTSGNYPNWVQQKPGQAPRGLIGGTKFLAPGTPARFSGSLLGGKAALTLSGVQPEDEAEYYCVLWYSNRWVFGGGTKLTVL

SEQ ID NO: 1436 - protein, 5 aa, Artificial Sequence
  Synthetic peptide
VYAMS

SEQ ID NO: 1437 - protein, 17 aa, Artificial Sequence
  Synthetic peptide
TISGSGGSTFYAESVKG

SEQ ID NO: 1438 - protein, 11 aa, Artificial Sequence
  Synthetic peptide
HDYSNYAYFDY

SEQ ID NO: 1439 - protein, 12 aa, Artificial Sequence
  Synthetic peptide
RASQSVRSSYLA

SEQ ID NO: 1440 - protein, 7 aa, Artificial Sequence
  Synthetic peptide
GASSRAT

SEQ ID NO: 1441 - protein, 9 aa, Artificial Sequence
  Synthetic peptide
QQYGDLPFT

SEQ ID NO: 1442 - protein, 120 aa, Artificial Sequence
  Synthetic peptide
EVQLLESGGGLVQPGGSLRLSCAASGFTFSVYAMSWVRQAPGKCLEWVSTISGSGGSTFYAESVKGRFTISRDNSKNTLYLQMNRLRAEDTAVYYCARHDYSNYAYFDYWGQGTLVTVSS

SEQ ID NO: 1443 - protein, 108 aa, Artificial Sequence; identical to SEQ ID NO: 638
  Synthetic peptide

SEQ ID NO: 1444 - protein, 243 aa, Artificial Sequence
  Synthetic peptide
EVQLLESGGGLVQPGGSLRLSCAASGFTFSVYAMSWVRQAPGKCLEWVSTISGSGGSTFYAESVKGRFTISRDNSKNTLYLQMNRLRAEDTAVYYCARHDYSNYAYFDYWGQGTLVTVSSGGGGSGGGGSGGGGSEIVLTQSPGTLSLSPGERATLSCRASQSVRSSYLAWYQQKPGQAPRLLIYGASSRATGIPDRFSGSGSGTDFTLTISRLEPEDFAVYYCQQYGDLPFTFGCGTKVEIK

SEQ ID NO: 1445 - protein, 498 aa, Artificial Sequence
  Synthetic peptide
EVQLLESGGGLVQPGGSLRLSCAASGFTFSVYAMSWVRQAPGKCLEWVSTISGSGGSTFYAESVKGRFTISRDNSKNTLYLQMNRLRAEDTAVYYCARHDYSNYAYFDYWGQGTLVTVSSGGGGSGGGGSGGGGSEIVLTQSPGTLSLSPGERATLSCRASQSVRSSYLAWYQQKPGQAPRLLIYGASSRATGIPDRFSGSGSGTDFTLTISRLEPEDFAVYYCQQYGDLPFTFGCGTKVEIKSGGGGSEVQLVESGGGLVQPGGSLKLSCAASGFTFNKYAMNWVRQAPGKGLEWVARIRSKYNNYATYYADSVKDRFTISRDDSKNTAYLQMNNLKTEDTAVYYCVRHGNFGNSYISYWAYWGQGTLVTVSSGGGGSGGGGSGGGGSQTVVTQEPSLTVSPGGTVTLTCGSSTGAVTSGNYPNWVQQKPGQAPRGLIGGTKFLAPGTPARFSGSLLGGKAALTLSGVQPEDEAEYYCVLWYSNRWVFGGGTKLTVL

SEQ ID NO: 1446 - protein, 120 aa, Artificial Sequence
  Synthetic peptide
EVQLLESGGGLVQPGGSLRLSCAASGFTFSVYAMSWVRQAPGKGLEWVSTISGSGGSTFYAESVKGRFTISRDNSKNTLYLQMNRLRAEDTAVYYCARHDYSNYAYFDYWGQGTLVTVSS

SEQ ID NO: 1447 - protein, 108 aa, Artificial Sequence; identical to SEQ ID NO: 228
  Synthetic peptide

SEQ ID NO: 1448 - protein, 243 aa, Artificial Sequence
  Synthetic peptide
EVQLLESGGGLVQPGGSLRLSCAASGFTFSVYAMSWVRQAPGKGLEWVSTISGSGGSTFYAESVKGRFTISRDNSKNTLYLQMNRLRAEDTAVYYCARHDYSNYAYFDYWGQGTLVTVSSGGGGSGGGGSGGGGSEIVLTQSPGTLSLSPGERATLSCRASQSVRSSYLAWYQQKPGQAPRLLIYGASSRATGIPDRFSGSGSGTDFTLTISRLEPEDFAVYYCQQYGDLPFTFGPGTKVEIK

SEQ ID NO: 1449 - protein, 498 aa, Artificial Sequence
  Synthetic peptide
EVQLLESGGGLVQPGGSLRLSCAASGFTFSVYAMSWVRQAPGKGLEWVSTISGSGGSTFYAESVKGRFTISRDNSKNTLYLQMNRLRAEDTAVYYCARHDYSNYAYFDYWGQGTLVTVSSGGGGSGGGGSGGGGSEIVLTQSPGTLSLSPGERATLSCRASQSVRSSYLAWYQQKPGQAPRLLIYGASSRATGIPDRFSGSGSGTDFTLTISRLEPEDFAVYYCQQYGDLPFTFGPGTKVEIKSGGGGSEVQLVESGGGLVQPGGSLKLSCAASGFTFNKYAMNWVRQAPGKGLEWVARIRSKYNNYATYYADSVKDRFTISRDDSKNTAYLQMNNLKTEDTAVYYCVRHGNFGNSYISYWAYWGQGTLVTVSSGGGGSGGGGSGGGGSQTVVTQEPSLTVSPGGTVTLTCGSSTGAVTSGNYPNWVQQKPGQAPRGLIGGTKFLAPGTPARFSGSLLGGKAALTLSGVQPEDEAEYYCVLWYSNRWVFGGGTKLTVL

SEQ ID NO: 1450 - protein, 5 aa, Artificial Sequence
  Synthetic peptide
SYGMH

SEQ ID NO: 1451 - protein, 17 aa, Artificial Sequence
  Synthetic peptide
VISYEGSNKYYAESVKG

SEQ ID NO: 1452 - protein, 15 aa, Artificial Sequence
  Synthetic peptide
GRYYGSGNYNHGMDV

SEQ ID NO: 1453 - protein, 11 aa, Artificial Sequence
  Synthetic peptide
RASQSISSYLN

SEQ ID NO: 1454 - protein, 7 aa, Artificial Sequence
  Synthetic peptide
AASSLQS

SEQ ID NO: 1455 - protein, 9 aa, Artificial Sequence
  Synthetic peptide
QQSYSTPFT

SEQ ID NO: 1456 - protein, 124 aa, Artificial Sequence
  Synthetic peptide
QVQLVESGGGVVQPGRSLRLSCAASGFMFSSYGMHWVRQAPGKCLEWVAVISYEGSNKYYAESVKGRFTISRDNSKNTLYLQMNSLRAEDTAVYYCARGRYYGSGNYNHGMDVWGQGTTVTVSS

SEQ ID NO: 1457 - protein, 107 aa, Artificial Sequence; identical to SEQ ID NO: 698
  Synthetic peptide

SEQ ID NO: 1458 - protein, 246 aa, Artificial Sequence
  Synthetic peptide
QVQLVESGGGVVQPGRSLRLSCAASGFMFSSYGMHWVRQAPGKCLEWVAVISYEGSNKYYAESVKGRFTISRDNSKNTLYLQMNSLRAEDTAVYYCARGRYYGSGNYNHGMDVWGQGTTVTVSSGGGGSGGGGSGGGGSDIQMTQSPSSLSASVGDRVTITCRASQSISSYLNWYQQKPGKAPKLLIYAASSLQSGVPSRFSGRGSGTDFTLTISSLQPEDFATYYCQQSYSTPFTFGCGTKVEIK

SEQ ID NO: 1459 - protein, 501 aa, Artificial Sequence
  Synthetic peptide
QVQLVESGGGVVQPGRSLRLSCAASGFMFSSYGMHWVRQAPGKCLEWVAVISYEGSNKYYAESVKGRFTISRDNSKNTLYLQMNSLRAEDTAVYYCARGRYYGSGNYNHGMDVWGQGTTVTVSSGGGGSGGGGSGGGGSDIQMTQSPSSLSASVGDRVTITCRASQSISSYLNWYQQKPGKAPKLLIYAASSLQSGVPSRFSGRGSGTDFTLTISSLQPEDFATYYCQQSYSTPFTFGCGTKVEIKSGGGGSEVQLVESGGGLVQPGGSLKLSCAASGFTFNKYAMNWVRQAPGKGLEWVARIRSKYNNYATYYADSVKDRFTISRDDSKNTAYLQMNNLKTEDTAVYYCVRHGNFGNSYISYWAYWGQGTLVTVSSGGGGSGGGGSGGGGSQTVVTQEPSLTVSPGGTVTLTCGSSTGAVTSGNYPNWVQQKPGQAPRGLIGGTKFLAPGTPARFSGSLLGGKAALTLSGVQPEDEAEYYCVLWYSNRWVFGGGTKLTVL

SEQ ID NO: 1460 - protein, 124 aa, Artificial Sequence
  Synthetic peptide
QVQLVESGGGVVQPGRSLRLSCAASGFMFSSYGMHWVRQAPGKGLEWVAVISYEGSNKYYAESVKGRFTISRDNSKNTLYLQMNSLRAEDTAVYYCARGRYYGSGNYNHGMDVWGQGTTVTVSS

SEQ ID NO: 1461 - protein, 107 aa, Artificial Sequence; identical to SEQ ID NO: 548
  Synthetic peptide

SEQ ID NO: 1462 - protein, 246 aa, Artificial Sequence
  Synthetic peptide
QVQLVESGGGVVQPGRSLRLSCAASGFMFSSYGMHWVRQAPGKGLEWVAVISYEGSNKYYAESVKGRFTISRDNSKNTLYLQMNSLRAEDTAVYYCARGRYYGSGNYNHGMDVWGQGTTVTVSSGGGGSGGGGSGGGGSDIQMTQSPSSLSASVGDRVTITCRASQSISSYLNWYQQKPGKAPKLLIYAASSLQSGVPSRFSGRGSGTDFTLTISSLQPEDFATYYCQQSYSTPFTFGPGTKVEIK

SEQ ID NO: 1463 - protein, 501 aa, Artificial Sequence
  Synthetic peptide
QVQLVESGGGVVQPGRSLRLSCAASGFMFSSYGMHWVRQAPGKGLEWVAVISYEGSNKYYAESVKGRFTISRDNSKNTLYLQMNSLRAEDTAVYYCARGRYYGSGNYNHGMDVWGQGTTVTVSSGGGGSGGGGSGGGGSDIQMTQSPSSLSASVGDRVTITCRASQSISSYLNWYQQKPGKAPKLLIYAASSLQSGVPSRFSGRGSGTDFTLTISSLQPEDFATYYCQQSYSTPFTFGPGTKVEIKSGGGGSEVQLVESGGGLVQPGGSLKLSCAASGFTFNKYAMNWVRQAPGKGLEWVARIRSKYNNYATYYADSVKDRFTISRDDSKNTAYLQMNNLKTEDTAVYYCVRHGNFGNSYISYWAYWGQGTLVTVSSGGGGSGGGGSGGGGSQTVVTQEPSLTVSPGGTVTLTCGSSTGAVTSGNYPNWVQQKPGQAPRGLIGGTKFLAPGTPARFSGSLLGGKAALTLSGVQPEDEAEYYCVLWYSNRWVFGGGTKLTVL

SEQ ID NO: 1464 - protein, 5 aa, Artificial Sequence
  Synthetic peptide
SYGMH

SEQ ID NO: 1465 - protein, 17 aa, Artificial Sequence
  Synthetic peptide
VTWYDASNKYYGDAVKG

SEQ ID NO: 1466 - protein, 13 aa, Artificial Sequence
  Synthetic peptide
DLLRGVKGYAMDV

SEQ ID NO: 1467 - protein, 12 aa, Artificial Sequence
  Synthetic peptide
RASQSLRRIYLA

SEQ ID NO: 1468 - protein, 7 aa, Artificial Sequence
  Synthetic peptide
DVFDRAT

SEQ ID NO: 1469 - protein, 9 aa, Artificial Sequence
  Synthetic peptide
QQYSESPFT

SEQ ID NO: 1470 - protein, 122 aa, Artificial Sequence
  Synthetic peptide
QVQLVESGGGVVQPGRSLRLSCAASGFTFSSYGMHWVRQAPGKCLEWVAVTWYDASNKYYGDAVKGRFTISRDNSKNTLYLQMNSLRAEDTAVYYCARDLLRGVKGYAMDVWGQGTTVTVSS

SEQ ID NO: 1471 - protein, 108 aa, Artificial Sequence
  Synthetic peptide
EIVLTQSPGTLSLSPGERATLSCRASQSLRRIYLAWYQQKPGQAPRLLIYDVFDRATGIPDRFSGGGSGTDFTLTISRLEPEDFAVYYCQQYSESPFTFGCGTKVDIK

SEQ ID NO: 1472 - protein, 245 aa, Artificial Sequence
  Synthetic peptide
QVQLVESGGGVVQPGRSLRLSCAASGFTFSSYGMHWVRQAPGKCLEWVAVTWYDASNKYYGDAVKGRFTISRDNSKNTLYLQMNSLRAEDTAVYYCARDLLRGVKGYAMDVWGQGTTVTVSSGGGGSGGGGSGGGGSEIVLTQSPGTLSLSPGERATLSCRASQSLRRIYLAWYQQKPGQAPRLLIYDVFDRATGIPDRFSGGGSGTDFTLTISRLEPEDFAVYYCQQYSESPFTFGCGTKVDIK

SEQ ID NO: 1473 - protein, 500 aa, Artificial Sequence
  Synthetic peptide
QVQLVESGGGVVQPGRSLRLSCAASGFTFSSYGMHWVRQAPGKCLEWVAVTWYDASNKYYGDAVKGRFTISRDNSKNTLYLQMNSLRAEDTAVYYCARDLLRGVKGYAMDVWGQGTTVTVSSGGGGSGGGGSGGGGSEIVLTQSPGTLSLSPGERATLSCRASQSLRRIYLAWYQQKPGQAPRLLIYDVFDRATGIPDRFSGGGSGTDFTLTISRLEPEDFAVYYCQQYSESPFTFGCGTKVDIKSGGGGSEVQLVESGGGLVQPGGSLKLSCAASGFTFNKYAMNWVRQAPGKGLEWVARIRSKYNNYATYYADSVKDRFTISRDDSKNTAYLQMNNLKTEDTAVYYCVRHGNFGNSYISYWAYWGQGTLVTVSSGGGGSGGGGSGGGGSQTVVTQEPSLTVSPGGTVTLTCGSSTGAVTSGNYPNWVQQKPGQAPRGLIGGTKFLAPGTPARFSGSLLGGKAALTLSGVQPEDEAEYYCVLWYSNRWVFGGGTKLTVL

SEQ ID NO: 1474 - protein, 122 aa, Artificial Sequence
  Synthetic peptide
QVQLVESGGGVVQPGRSLRLSCAASGFTFSSYGMHWVRQAPGKGLEWVAVTWYDASNKYYGDAVKGRFTISRDNSKNTLYLQMNSLRAEDTAVYYCARDLLRGVKGYAMDVWGQGTTVTVSS

SEQ ID NO: 1475 - protein, 108 aa, Artificial Sequence
  Synthetic peptide
EIVLTQSPGTLSLSPGERATLSCRASQSLRRIYLAWYQQKPGQAPRLLIYDVFDRATGIPDRFSGGGSGTDFTLTISRLEPEDFAVYYCQQYSESPFTFGPGTKVDIK

SEQ ID NO: 1476 - protein, 245 aa, Artificial Sequence
  Synthetic peptide
QVQLVESGGGVVQPGRSLRLSCAASGFTFSSYGMHWVRQAPGKGLEWVAVTWYDASNKYYGDAVKGRFTISRDNSKNTLYLQMNSLRAEDTAVYYCARDLLRGVKGYAMDVWGQGTTVTVSSGGGGSGGGGSGGGGSEIVLTQSPGTLSLSPGERATLSCRASQSLRRIYLAWYQQKPGQAPRLLIYDVFDRATGIPDRFSGGGSGTDFTLTISRLEPEDFAVYYCQQYSESPFTFGPGTKVDIK

SEQ ID NO: 1477 - protein, 500 aa, Artificial Sequence
  Synthetic peptide
QVQLVESGGGVVQPGRSLRLSCAASGFTFSSYGMHWVRQAPGKGLEWVAVTWYDASNKYYGDAVKGRFTISRDNSKNTLYLQMNSLRAEDTAVYYCARDLLRGVKGYAMDVWGQGTTVTVSSGGGGSGGGGSGGGGSEIVLTQSPGTLSLSPGERATLSCRASQSLRRIYLAWYQQKPGQAPRLLIYDVFDRATGIPDRFSGGGSGTDFTLTISRLEPEDFAVYYCQQYSESPFTFGPGTKVDIKSGGGGSEVQLVESGGGLVQPGGSLKLSCAASGFTFNKYAMNWVRQAPGKGLEWVARIRSKYNNYATYYADSVKDRFTISRDDSKNTAYLQMNNLKTEDTAVYYCVRHGNFGNSYISYWAYWGQGTLVTVSSGGGGSGGGGSGGGGSQTVVTQEPSLTVSPGGTVTLTCGSSTGAVTSGNYPNWVQQKPGQAPRGLIGGTKFLAPGTPARFSGSLLGGKAALTLSGVQPEDEAEYYCVLWYSNRWVFGGGTKLTVL

SEQ ID NO: 1478 - protein, 5 aa, Artificial Sequence
  Synthetic peptide
SYGIS

SEQ ID NO: 1479 - protein, 17 aa, Artificial Sequence
  Synthetic peptide
WISAYQGYTHYAQKLQG

SEQ ID NO: 1480 - protein, 12 aa, Artificial Sequence
  Synthetic peptide
DYGGNDYYGMDV

SEQ ID NO: 1481 - protein, 13 aa, Artificial Sequence
  Synthetic peptide
SGSSSNIGINYVY

SEQ ID NO: 1482 - protein, 7 aa, Artificial Sequence
  Synthetic peptide
RSDQRPS

SEQ ID NO: 1483 - protein, 11 aa, Artificial Sequence
  Synthetic peptide
AAFDESLSGVV

SEQ ID NO: 1484 - protein, 121 aa, Artificial Sequence
  Synthetic peptide
QVQLVQSGAEVKKPGASVKVSCKASGYTFTSYGISWVRQAPGQCLEWMGWISAYQGYTHYAQKLQGRVTMTTDTSTSTAYMELRSLRSDDTAVYYCARDYGGNDYYGMDVWGQGTTVTVSS

SEQ ID NO: 1485 - protein, 110 aa, Artificial Sequence
  Synthetic peptide
QSVLTQPPSASGTPGQRVTISCSGSSSNIGINYVYWYQQLPGTAPKLLIYRSDQRPSGVPDRFSGSKSGTSASLALSGLRSEDEADYYCAAFDESLSGVVFGCGTKLTVL

SEQ ID NO: 1486 - protein, 246 aa, Artificial Sequence
  Synthetic peptide
QVQLVQSGAEVKKPGASVKVSCKASGYTFTSYGISWVRQAPGQCLEWMGWISAYQGYTHYAQKLQGRVTMTTDTSTSTAYMELRSLRSDDTAVYYCARDYGGNDYYGMDVWGQGTTVTVSSGGGGSGGGGSGGGGSQSVLTQPPSASGTPGQRVTISCSGSSSNIGINYVYWYQQLPGTAPKLLIYRSDQRPSGVPDRFSGSKSGTSASLALSGLRSEDEADYYCAAFDESLSGVVFGCGTKLTVL

SEQ ID NO: 1487 - protein, 501 aa, Artificial Sequence
  Synthetic peptide
QVQLVQSGAEVKKPGASVKVSCKASGYTFTSYGISWVRQAPGQCLEWMGWISAYQGYTHYAQKLQGRVTMTTDTSTSTAYMELRSLRSDDTAVYYCARDYGGNDYYGMDVWGQGTTVTVSSGGGGSGGGGSGGGGSQSVLTQPPSASGTPGQRVTISCSGSSSNIGINYVYWYQQLPGTAPKLLIYRSDQRPSGVPDRFSGSKSGTSASLALSGLRSEDEADYYCAAFDESLSGVVFGCGTKLTVLSGGGGSEVQLVESGGGLVQPGGSLKLSCAASGFTFNKYAMNWVRQAPGKGLEWVARIRSKYNNYATYYADSVKDRFTISRDDSKNTAYLQMNNLKTEDTAVYYCVRHGNFGNSYISYWAYWGQGTLVTVSSGGGGSGGGGSGGGGSQTVVTQEPSLTVSPGGTVTLTCGSSTGAVTSGNYPNWVQQKPGQAPRGLIGGTKFLAPGTPARFSGSLLGGKAALTLSGVQPEDEAEYYCVLWYSNRWVFGGGTKLTVL

SEQ ID NO: 1488 - protein, 121 aa, Artificial Sequence
  Synthetic peptide
QVQLVQSGAEVKKPGASVKVSCKASGYTFTSYGISWVRQAPGQGLEWMGWISAYQGYTHYAQKLQGRVTMTTDTSTSTAYMELRSLRSDDTAVYYCARDYGGNDYYGMDVWGQGTTVTVSS

SEQ ID NO: 1489 - protein, 110 aa, Artificial Sequence
  Synthetic peptide
QSVLTQPPSASGTPGQRVTISCSGSSSNIGINYVYWYQQLPGTAPKLLIYRSDQRPSGVPDRFSGSKSGTSASLALSGLRSEDEADYYCAAFDESLSGVVFGGGTKLTVL

SEQ ID NO: 1490 - protein, 246 aa, Artificial Sequence
  Synthetic peptide
QVQLVQSGAEVKKPGASVKVSCKASGYTFTSYGISWVRQAPGQGLEWMGWISAYQGYTHYAQKLQGRVTMTTDTSTSTAYMELRSLRSDDTAVYYCARDYGGNDYYGMDVWGQGTTVTVSSGGGGSGGGGSGGGGSQSVLTQPPSASGTPGQRVTISCSGSSSNIGINYVYWYQQLPGTAPKLLIYRSDQRPSGVPDRFSGSKSGTSASLALSGLRSEDEADYYCAAFDESLSGVVFGGGTKLTVL

SEQ ID NO: 1491 - protein, 501 aa, Artificial Sequence
  Synthetic peptide
QVQLVQSGAEVKKPGASVKVSCKASGYTFTSYGISWVRQAPGQGLEWMGWISAYQGYTHYAQKLQGRVTMTTDTSTSTAYMELRSLRSDDTAVYYCARDYGGNDYYGMDVWGQGTTVTVSSGGGGSGGGGSGGGGSQSVLTQPPSASGTPGQRVTISCSGSSSNIGINYVYWYQQLPGTAPKLLIYRSDQRPSGVPDRFSGSKSGTSASLALSGLRSEDEADYYCAAFDESLSGVVFGGGTKLTVLSGGGGSEVQLVESGGGLVQPGGSLKLSCAASGFTFNKYAMNWVRQAPGKGLEWVARIRSKYNNYATYYADSVKDRFTISRDDSKNTAYLQMNNLKTEDTAVYYCVRHGNFGNSYISYWAYWGQGTLVTVSSGGGGSGGGGSGGGGSQTVVTQEPSLTVSPGGTVTLTCGSSTGAVTSGNYPNWVQQKPGQAPRGLIGGTKFLAPGTPARFSGSLLGGKAALTLSGVQPEDEAEYYCVLWYSNRWVFGGGTKLTVL

SEQ ID NO: 1492 - protein, 5 aa, Artificial Sequence
  Synthetic peptide
YYGMH

SEQ ID NO: 1493 - protein, 17 aa, Artificial Sequence
  Synthetic peptide
VIWYDASNKYYADAVKG

SEQ ID NO: 1494 - protein, 12 aa, Artificial Sequence
  Synthetic peptide
DREMGSRGDFDY

SEQ ID NO: 1495 - protein, 11 aa, Artificial Sequence
  Synthetic peptide
RASQGINNYLA

SEQ ID NO: 1496 - protein, 7 aa, Artificial Sequence
  Synthetic peptide
AVSILQS

SEQ ID NO: 1497 - protein, 9 aa, Artificial Sequence
  Synthetic peptide
QQYNFYPFS

SEQ ID NO: 1498 - protein, 121 aa, Artificial Sequence
  Synthetic peptide
QAQLVESGGGVVQPGRSLRLSCAASGFTFSYYGMHWVRQAPGKCLEWVAVIWYDASNKYYADAVKGRFTISRDNSKNTLYLQMNSLRAEDTAVYYCARDREMGSRGDFDYWGQGTLVTVSS

SEQ ID NO: 1499 - protein, 107 aa, Artificial Sequence
  Synthetic peptide
DIQMTQSPSSLSASVGDRVTITCRASQGINNYLAWFQQKPGKAPKSLIYAVSILQSGVPSKFSGSGSGTDFTLTISNLQPEDFATYYCQQYNFYPFSFGCGTKVDIK

SEQ ID NO: 1500 - protein, 243 aa, Artificial Sequence
  Synthetic peptide
QAQLVESGGGVVQPGRSLRLSCAASGFTFSYYGMHWVRQAPGKCLEWVAVIWYDASNKYYADAVKGRFTISRDNSKNTLYLQMNSLRAEDTAVYYCARDREMGSRGDFDYWGQGTLVTVSSGGGGSGGGGSGGGGSDIQMTQSPSSLSASVGDRVTITCRASQGINNYLAWFQQKPGKAPKSLIYAVSILQSGVPSKFSGSGSGTDFTLTISNLQPEDFATYYCQQYNFYPFSFGCGTKVDIK

SEQ ID NO: 1501 - protein, 498 aa, Artificial Sequence
  Synthetic peptide
QAQLVESGGGVVQPGRSLRLSCAASGFTFSYYGMHWVRQAPGKCLEWVAVIWYDASNKYYADAVKGRFTISRDNSKNTLYLQMNSLRAEDTAVYYCARDREMGSRGDFDYWGQGTLVTVSSGGGGSGGGGSGGGGSDIQMTQSPSSLSASVGDRVTITCRASQGINNYLAWFQQKPGKAPKSLIYAVSILQSGVPSKFSGSGSGTDFTLTISNLQPEDFATYYCQQYNFYPFSFGCGTKVDIKSGGGGSEVQLVESGGGLVQPGGSLKLSCAASGFTFNKYAMNWVRQAPGKGLEWVARIRSKYNNYATYYADSVKDRFTISRDDSKNTAYLQMNNLKTEDTAVYYCVRHGNFGNSYISYWAYWGQGTLVTVSSGGGGSGGGGSGGGGSQTVVTQEPSLTVSPGGTVTLTCGSSTGAVTSGNYPNWVQQKPGQAPRGLIGGTKFLAPGTPARFSGSLLGGKAALTLSGVQPEDEAEYYCVLWYSNRWVFGGGTKLTVL

SEQ ID NO: 1502 - protein, 121 aa, Artificial Sequence
  Synthetic peptide
QAQLVESGGGVVQPGRSLRLSCAASGFTFSYYGMHWVRQAPGKGLEWVAVIWYDASNKYYADAVKGRFTISRDNSKNTLYLQMNSLRAEDTAVYYCARDREMGSRGDFDYWGQGTLVTVSS

SEQ ID NO: 1503 - protein, 107 aa, Artificial Sequence
  Synthetic peptide
DIQMTQSPSSLSASVGDRVTITCRASQGINNYLAWFQQKPGKAPKSLIYAVSILQSGVPSKFSGSGSGTDFTLTISNLQPEDFATYYCQQYNFYPFSFGQGTKVDIK

SEQ ID NO: 1504 - protein, 243 aa, Artificial Sequence
  Synthetic peptide
QAQLVESGGGVVQPGRSLRLSCAASGFTFSYYGMHWVRQAPGKGLEWVAVIWYDASNKYYADAVKGRFTISRDNSKNTLYLQMNSLRAEDTAVYYCARDREMGSRGDFDYWGQGTLVTVSSGGGGSGGGGSGGGGSDIQMTQSPSSLSASVGDRVTITCRASQGINNYLAWFQQKPGKAPKSLIYAVSILQSGVPSKFSGSGSGTDFTLTISNLQPEDFATYYCQQYNFYPFSFGQGTKVDIK

SEQ ID NO: 1505 - protein, 498 aa, Artificial Sequence
  Synthetic peptide
QAQLVESGGGVVQPGRSLRLSCAASGFTFSYYGMHWVRQAPGKGLEWVAVIWYDASNKYYADAVKGRFTISRDNSKNTLYLQMNSLRAEDTAVYYCARDREMGSRGDFDYWGQGTLVTVSSGGGGSGGGGSGGGGSDIQMTQSPSSLSASVGDRVTITCRASQGINNYLAWFQQKPGKAPKSLIYAVSILQSGVPSKFSGSGSGTDFTLTISNLQPEDFATYYCQQYNFYPFSFGQGTKVDIKSGGGGSEVQLVESGGGLVQPGGSLKLSCAASGFTFNKYAMNWVRQAPGKGLEWVARIRSKYNNYATYYADSVKDRFTISRDDSKNTAYLQMNNLKTEDTAVYYCVRHGNFGNSYISYWAYWGQGTLVTVSSGGGGSGGGGSGGGGSQTVVTQEPSLTVSPGGTVTLTCGSSTGAVTSGNYPNWVQQKPGQAPRGLIGGTKFLAPGTPARFSGSLLGGKAALTLSGVQPEDEAEYYCVLWYSNRWVFGGGTKLTVL

SEQ ID NO: 1506 - protein, 5 aa, Artificial Sequence
  Synthetic peptide
GFYWS

SEQ ID NO: 1507 - protein, 16 aa, Artificial Sequence
  Synthetic peptide
EIYHSGHATNNPSLKS

SEQ ID NO: 1508 - protein, 10 aa, Artificial Sequence
  Synthetic peptide
GGNSGYIFDY

SEQ ID NO: 1509 - protein, 11 aa, Artificial Sequence
  Synthetic peptide
RTSQYIGRYLN

SEQ ID NO: 1510 - protein, 7 aa, Artificial Sequence
  Synthetic peptide
GASTLQQ

SEQ ID NO: 1511 - protein, 9 aa, Artificial Sequence
  Synthetic peptide
QQTYSTPRT

SEQ ID NO: 1512 - protein, 118 aa, Artificial Sequence
  Synthetic peptide
QVQLQQWGAGLLKPSETLSLTCAVYGGSFSGFYWSWIRQPPGKCLEWIGEIYHSGHATNNPSLKSRVTISLDTSKNQFSLKLNSVTAADTAVYYCARGGNSGYIFDYWGQGTLVTVSS

SEQ ID NO: 1513 - protein, 107 aa, Artificial Sequence
  Synthetic peptide
DVQMTQSPSSLSASVGDRVTITCRTSQYIGRYLNWYQQKPGKAPKVLIYGASTLQQGVPSRFSGSGSGTDFTLTITSLQPEDFASYYCQQTYSTPRTFGCGTKVEIK

SEQ ID NO: 1514 - protein, 240 aa, Artificial Sequence
  Synthetic peptide
QVQLQQWGAGLLKPSETLSLTCAVYGGSFSGFYWSWIRQPPGKCLEWIGEIYHSGHATNNPSLKSRVTISLDTSKNQFSLKLNSVTAADTAVYYCARGGNSGYIFDYWGQGTLVTVSSGGGGSGGGGSGGGGSDVQMTQSPSSLSASVGDRVTITCRTSQYIGRYLNWYQQKPGKAPKVLIYGASTLQQGVPSRFSGSGSGTDFTLTITSLQPEDFASYYCQQTYSTPRTFGCGTKVEIK

SEQ ID NO: 1515 - protein, 495 aa, Artificial Sequence
  Synthetic peptide
QVQLQQWGAGLLKPSETLSLTCAVYGGSFSGFYWSWIRQPPGKCLEWIGEIYHSGHATNNPSLKSRVTISLDTSKNQFSLKLNSVTAADTAVYYCARGGNSGYIFDYWGQGTLVTVSSGGGGSGGGGSGGGGSDVQMTQSPSSLSASVGDRVTITCRTSQYIGRYLNWYQQKPGKAPKVLIYGASTLQQGVPSRFSGSGSGTDFTLTITSLQPEDFASYYCQQTYSTPRTFGCGTKVEIKSGGGGSEVQLVESGGGLVQPGGSLKLSCAASGFTFNKYAMNWVRQAPGKGLEWVARIRSKYNNYATYYADSVKDRFTISRDDSKNTAYLQMNNLKTEDTAVYYCVRHGNFGNSYISYWAYWGQGTLVTVSSGGGGSGGGGSGGGGSQTVVTQEPSLTVSPGGTVTLTCGSSTGAVTSGNYPNWVQQKPGQAPRGLIGGTKFLAPGTPARFSGSLLGGKAALTLSGVQPEDEAEYYCVLWYSNRWVFGGGTKLTVL

SEQ ID NO: 1516 - protein, 118 aa, Artificial Sequence
  Synthetic peptide
QVQLQQWGAGLLKPSETLSLTCAVYGGSFSGFYWSWIRQPPGKGLEWIGEIYHSGHATNNPSLKSRVTISLDTSKNQFSLKLNSVTAADTAVYYCARGGNSGYIFDYWGQGTLVTVSS

SEQ ID NO: 1517 - protein, 107 aa, Artificial Sequence
  Synthetic peptide
DVQMTQSPSSLSASVGDRVTITCRTSQYIGRYLNWYQQKPGKAPKVLIYGASTLQQGVPSRFSGSGSGTDFTLTITSLQPEDFASYYCQQTYSTPRTFGQGTKVEIK

SEQ ID NO: 1518 - protein, 240 aa, Artificial Sequence
  Synthetic peptide
QVQLQQWGAGLLKPSETLSLTCAVYGGSFSGFYWSWIRQPPGKGLEWIGEIYHSGHATNNPSLKSRVTISLDTSKNQFSLKLNSVTAADTAVYYCARGGNSGYIFDYWGQGTLVTVSSGGGGSGGGGSGGGGSDVQMTQSPSSLSASVGDRVTITCRTSQYIGRYLNWYQQKPGKAPKVLIYGASTLQQGVPSRFSGSGSGTDFTLTITSLQPEDFASYYCQQTYSTPRTFGQGTKVEIK

SEQ ID NO: 1519 - protein, 495 aa, Artificial Sequence
  Synthetic peptide
QVQLQQWGAGLLKPSETLSLTCAVYGGSFSGFYWSWIRQPPGKGLEWIGEIYHSGHATNNPSLKSRVTISLDTSKNQFSLKLNSVTAADTAVYYCARGGNSGYIFDYWGQGTLVTVSSGGGGSGGGGSGGGGSDVQMTQSPSSLSASVGDRVTITCRTSQYIGRYLNWYQQKPGKAPKVLIYGASTLQQGVPSRFSGSGSGTDFTLTITSLQPEDFASYYCQQTYSTPRTFGQGTKVEIKSGGGGSEVQLVESGGGLVQPGGSLKLSCAASGFTFNKYAMNWVRQAPGKGLEWVARIRSKYNNYATYYADSVKDRFTISRDDSKNTAYLQMNNLKTEDTAVYYCVRHGNFGNSYISYWAYWGQGTLVTVSSGGGGSGGGGSGGGGSQTVVTQEPSLTVSPGGTVTLTCGSSTGAVTSGNYPNWVQQKPGQAPRGLIGGTKFLAPGTPARFSGSLLGGKAALTLSGVQPEDEAEYYCVLWYSNRWVFGGGTKLTVL

SEQ ID NO: 1520 - protein, 5 aa, Artificial Sequence
  Synthetic peptide
TYGMH

SEQ ID NO: 1521 - protein, 17 aa, Artificial Sequence
  Synthetic peptide
VIWYEGSNKYYGESVKG

SEQ ID NO: 1522 - protein, 11 aa, Artificial Sequence
  Synthetic peptide
DNSHYYYGMDV

SEQ ID NO: 1523 - protein, 14 aa, Artificial Sequence
  Synthetic peptide
TGSSSNIGAGYDVN

SEQ ID NO: 1524 - protein, 7 aa, Artificial Sequence
  Synthetic peptide
VNNNRPS

SEQ ID NO: 1525 - protein, 11 aa, Artificial Sequence
  Synthetic peptide
QSYDTSLSASV

SEQ ID NO: 1526 - protein, 120 aa, Artificial Sequence
  Synthetic peptide
QVQLVESGGGVVQPGRSLRLSCAASGFTFSTYGMHWVRQAPGKCLEWVAVIWYEGSNKYYGESVKGRFTISRDNSKNTLYLQMNSLRAEDTAVYYCARDNSHYYYGMDVWGQGTTVTVSS

SEQ ID NO: 1527 - protein, 111 aa, Artificial Sequence
  Synthetic peptide
QSVLTQPPSVSGAPGQRVTISCTGSSSNIGAGYDVNWYQQFPGTAPKLLIYVNNNRPSGVPDRFSGSTSGTSASLAITGLQAEDEADYYCQSYDTSLSASVFGCGTRLTVL

SEQ ID NO: 1528 - protein, 246 aa, Artificial Sequence
  Synthetic peptide
QVQLVESGGGVVQPGRSLRLSCAASGFTFSTYGMHWVRQAPGKCLEWVAVIWYEGSNKYYGESVKGRFTISRDNSKNTLYLQMNSLRAEDTAVYYCARDNSHYYYGMDVWGQGTTVTVSSGGGGSGGGGSGGGGSQSVLTQPPSVSGAPGQRVTISCTGSSSNIGAGYDVNWYQQFPGTAPKLLIYVNNNRPSGVPDRFSGSTSGTSASLAITGLQAEDEADYYCQSYDTSLSASVFGCGTRLTVL

SEQ ID NO: 1529 - protein, 501 aa, Artificial Sequence
  Synthetic peptide
QVQLVESGGGVVQPGRSLRLSCAASGFTFSTYGMHWVRQAPGKCLEWVAVIWYEGSNKYYGESVKGRFTISRDNSKNTLYLQMNSLRAEDTAVYYCARDNSHYYYGMDVWGQGTTVTVSSGGGGSGGGGSGGGGSQSVLTQPPSVSGAPGQRVTISCTGSSSNIGAGYDVNWYQQFPGTAPKLLIYVNNNRPSGVPDRFSGSTSGTSASLAITGLQAEDEADYYCQSYDTSLSASVFGCGTRLTVLSGGGGSEVQLVESGGGLVQPGGSLKLSCAASGFTFNKYAMNWVRQAPGKGLEWVARIRSKYNNYATYYADSVKDRFTISRDDSKNTAYLQMNNLKTEDTAVYYCVRHGNFGNSYISYWAYWGQGTLVTVSSGGGGSGGGGSGGGGSQTVVTQEPSLTVSPGGTVTLTCGSSTGAVTSGNYPNWVQQKPGQAPRGLIGGTKFLAPGTPARFSGSLLGGKAALTLSGVQPEDEAEYYCVLWYSNRWVFGGGTKLTVL

SEQ ID NO: 1530 - protein, 120 aa, Artificial Sequence
  Synthetic peptide
QVQLVESGGGVVQPGRSLRLSCAASGFTFSTYGMHWVRQAPGKGLEWVAVIWYEGSNKYYGESVKGRFTISRDNSKNTLYLQMNSLRAEDTAVYYCARDNSHYYYGMDVWGQGTTVTVSS

SEQ ID NO: 1531 - protein, 111 aa, Artificial Sequence; identical to SEQ ID NO: 8
  Synthetic peptide

SEQ ID NO: 1532 - protein, 246 aa, Artificial Sequence
  Synthetic peptide
QVQLVESGGGVVQPGRSLRLSCAASGFTFSTYGMHWVRQAPGKGLEWVAVIWYEGSNKYYGESVKGRFTISRDNSKNTLYLQMNSLRAEDTAVYYCARDNSHYYYGMDVWGQGTTVTVSSGGGGSGGGGSGGGGSQSVLTQPPSVSGAPGQRVTISCTGSSSNIGAGYDVNWYQQFPGTAPKLLIYVNNNRPSGVPDRFSGSTSGTSASLAITGLQAEDEADYYCQSYDTSLSASVFGGGTRLTVL

SEQ ID NO: 1533 - protein, 501 aa, Artificial Sequence
  Synthetic peptide
QVQLVESGGGVVQPGRSLRLSCAASGFTFSTYGMHWVRQAPGKGLEWVAVIWYEGSNKYYGESVKGRFTISRDNSKNTLYLQMNSLRAEDTAVYYCARDNSHYYYGMDVWGQGTTVTVSSGGGGSGGGGSGGGGSQSVLTQPPSVSGAPGQRVTISCTGSSSNIGAGYDVNWYQQFPGTAPKLLIYVNNNRPSGVPDRFSGSTSGTSASLAITGLQAEDEADYYCQSYDTSLSASVFGGGTRLTVLSGGGGSEVQLVESGGGLVQPGGSLKLSCAASGFTFNKYAMNWVRQAPGKGLEWVARIRSKYNNYATYYADSVKDRFTISRDDSKNTAYLQMNNLKTEDTAVYYCVRHGNFGNSYISYWAYWGQGTLVTVSSGGGGSGGGGSGGGGSQTVVTQEPSLTVSPGGTVTLTCGSSTGAVTSGNYPNWVQQKPGQAPRGLIGGTKFLAPGTPARFSGSLLGGKAALTLSGVQPEDEAEYYCVLWYSNRWVFGGGTKLTVL

SEQ ID NO: 1534 - protein, 5 aa, Artificial Sequence
  Synthetic peptide
TYGMH

SEQ ID NO: 1535 - protein, 17 aa, Artificial Sequence
  Synthetic peptide
VIWYEGSNKYYGESVKG

SEQ ID NO: 1536 - protein, 11 aa, Artificial Sequence
  Synthetic peptide
DNSHYYYGMDV

SEQ ID NO: 1537 - protein, 14 aa, Artificial Sequence
  Synthetic peptide
TGSSSNIGAGYDVN

SEQ ID NO: 1538 - protein, 7 aa, Artificial Sequence
  Synthetic peptide
VNNNRPS

SEQ ID NO: 1539 - protein, 11 aa, Artificial Sequence
  Synthetic peptide
QSYETSLSASV

SEQ ID NO: 1540 - protein, 120 aa, Artificial Sequence
  Synthetic peptide
QVQLVESGGGVVQPGRSLRLSCAASGFTFSTYGMHWVRQAPGKCLEWVAVIWYEGSNKYYGESVKGRFTISRDNSKNTLYLQMNSLRAEDTAVYYCARDNSHYYYGMDVWGQGTLVTVSS

SEQ ID NO: 1541 - protein, 111 aa, Artificial Sequence
  Synthetic peptide
QSVLTQPPSVSGAPGQRVTISCTGSSSNIGAGYDVNWYQQLPGTAPKLLIYVNNNRPSGVPDRFSGSKSGTSASLAITGLQAEDEADYYCQSYETSLSASVFGCGTRLTVL

SEQ ID NO: 1542 - protein, 246 aa, Artificial Sequence
  Synthetic peptide
QVQLVESGGGVVQPGRSLRLSCAASGFTFSTYGMHWVRQAPGKCLEWVAVIWYEGSNKYYGESVKGRFTISRDNSKNTLYLQMNSLRAEDTAVYYCARDNSHYYYGMDVWGQGTLVTVSSGGGGSGGGGSGGGGSQSVLTQPPSVSGAPGQRVTISCTGSSSNIGAGYDVNWYQQLPGTAPKLLIYVNNNRPSGVPDRFSGSKSGTSASLAITGLQAEDEADYYCQSYETSLSASVFGCGTRLTVL

SEQ ID NO: 1543 - protein, 501 aa, Artificial Sequence
  Synthetic peptide
QVQLVESGGGVVQPGRSLRLSCAASGFTFSTYGMHWVRQAPGKCLEWVAVIWYEGSNKYYGESVKGRFTISRDNSKNTLYLQMNSLRAEDTAVYYCARDNSHYYYGMDVWGQGTLVTVSSGGGGSGGGGSGGGGSQSVLTQPPSVSGAPGQRVTISCTGSSSNIGAGYDVNWYQQLPGTAPKLLIYVNNNRPSGVPDRFSGSKSGTSASLAITGLQAEDEADYYCQSYETSLSASVFGCGTRLTVLSGGGGSEVQLVESGGGLVQPGGSLKLSCAASGFTFNKYAMNWVRQAPGKGLEWVARIRSKYNNYATYYADSVKDRFTISRDDSKNTAYLQMNNLKTEDTAVYYCVRHGNFGNSYISYWAYWGQGTLVTVSSGGGGSGGGGSGGGGSQTVVTQEPSLTVSPGGTVTLTCGSSTGAVTSGNYPNWVQQKPGQAPRGLIGGTKFLAPGTPARFSGSLLGGKAALTLSGVQPEDEAEYYCVLWYSNRWVFGGGTKLTVL

SEQ ID NO: 1544 - protein, 120 aa, Artificial Sequence
  Synthetic peptide
QVQLVESGGGVVQPGRSLRLSCAASGFTFSTYGMHWVRQAPGKGLEWVAVIWYEGSNKYYGESVKGRFTISRDNSKNTLYLQMNSLRAEDTAVYYCARDNSHYYYGMDVWGQGTLVTVSS

SEQ ID NO: 1545 - protein, 111 aa, Artificial Sequence
  Synthetic peptide
QSVLTQPPSVSGAPGQRVTISCTGSSSNIGAGYDVNWYQQLPGTAPKLLIYVNNNRPSGVPDRFSGSKSGTSASLAITGLQAEDEADYYCQSYETSLSASVFGGGTRLTVL

SEQ ID NO: 1546 - protein, 246 aa, Artificial Sequence
  Synthetic peptide
QVQLVESGGGVVQPGRSLRLSCAASGFTFSTYGMHWVRQAPGKGLEWVAVIWYEGSNKYYGESVKGRFTISRDNSKNTLYLQMNSLRAEDTAVYYCARDNSHYYYGMDVWGQGTLVTVSSGGGGSGGGGSGGGGSQSVLTQPPSVSGAPGQRVTISCTGSSSNIGAGYDVNWYQQLPGTAPKLLIYVNNNRPSGVPDRFSGSKSGTSASLAITGLQAEDEADYYCQSYETSLSASVFGGGTRLTVL

SEQ ID NO: 1547 - protein, 501 aa, Artificial Sequence
  Synthetic peptide
QVQLVESGGGVVQPGRSLRLSCAASGFTFSTYGMHWVRQAPGKGLEWVAVIWYEGSNKYYGESVKGRFTISRDNSKNTLYLQMNSLRAEDTAVYYCARDNSHYYYGMDVWGQGTLVTVSSGGGGSGGGGSGGGGSQSVLTQPPSVSGAPGQRVTISCTGSSSNIGAGYDVNWYQQLPGTAPKLLIYVNNNRPSGVPDRFSGSKSGTSASLAITGLQAEDEADYYCQSYETSLSASVFGGGTRLTVLSGGGGSEVQLVESGGGLVQPGGSLKLSCAASGFTFNKYAMNWVRQAPGKGLEWVARIRSKYNNYATYYADSVKDRFTISRDDSKNTAYLQMNNLKTEDTAVYYCVRHGNFGNSYISYWAYWGQGTLVTVSSGGGGSGGGGSGGGGSQTVVTQEPSLTVSPGGTVTLTCGSSTGAVTSGNYPNWVQQKPGQAPRGLIGGTKFLAPGTPARFSGSLLGGKAALTLSGVQPEDEAEYYCVLWYSNRWVFGGGTKLTVL

SEQ ID NO: 1548 - protein, 7 aa, Artificial Sequence
  Synthetic peptide
SGVYYWS

SEQ ID NO: 1549 - protein, 16 aa, Artificial Sequence
  Synthetic peptide
YIYYSGSTSYNPSLKS

SEQ ID NO: 1550 - protein, 10 aa, Artificial Sequence
  Synthetic peptide
SGYSYALFDY

SEQ ID NO: 1551 - protein, 11 aa, Artificial Sequence
  Synthetic peptide
RASQSVDRYFN

SEQ ID NO: 1552 - protein, 7 aa, Artificial Sequence
  Synthetic peptide
AASSLQS

SEQ ID NO: 1553 - protein, 9 aa, Artificial Sequence
  Synthetic peptide
QQSYSTPWT

SEQ ID NO: 1554 - protein, 120 aa, Artificial Sequence
  Synthetic peptide
QMQLQESGPGLVKPSETLSLTCTVSGGSIESGVYYWSWIRQPPGKCLEWIGYIYYSGSTSYNPSLKSRLTMSVDTSKNQFSLKLSSVTAADTAVYYCARSGYSYALFDYWGQGTLVTVSS

SEQ ID NO: 1555 - protein, 107 aa, Artificial Sequence
  Synthetic peptide
DIQMTQSPSSLSASLGDRVTITCRASQSVDRYFNWYQQKPGKAPKVLIFAASSLQSGVPSRFSGSGSGTDFTLTISSLQPEDFATYYCQQSYSTPWTFGCGTKVEVK

SEQ ID NO: 1556 - protein, 242 aa, Artificial Sequence
  Synthetic peptide
QMQLQESGPGLVKPSETLSLTCTVSGGSIESGVYYWSWIRQPPGKCLEWIGYIYYSGSTSYNPSLKSRLTMSVDTSKNQFSLKLSSVTAADTAVYYCARSGYSYALFDYWGQGTLVTVSSGGGGSGGGGSGGGGSDIQMTQSPSSLSASLGDRVTITCRASQSVDRYFNWYQQKPGKAPKVLIFAASSLQSGVPSRFSGSGSGTDFTLTISSLQPEDFATYYCQQSYSTPWTFGCGTKVEVK

SEQ ID NO: 1557 - protein, 497 aa, Artificial Sequence
  Synthetic peptide
QMQLQESGPGLVKPSETLSLTCTVSGGSIESGVYYWSWIRQPPGKCLEWIGYIYYSGSTSYNPSLKSRLTMSVDTSKNQFSLKLSSVTAADTAVYYCARSGYSYALFDYWGQGTLVTVSSGGGGSGGGGSGGGGSDIQMTQSPSSLSASLGDRVTITCRASQSVDRYFNWYQQKPGKAPKVLIFAASSLQSGVPSRFSGSGSGTDFTLTISSLQPEDFATYYCQQSYSTPWTFGCGTKVEVKSGGGGSEVQLVESGGGLVQPGGSLKLSCAASGFTFNKYAMNWVRQAPGKGLEWVARIRSKYNNYATYYADSVKDRFTISRDDSKNTAYLQMNNLKTEDTAVYYCVRHGNFGNSYISYWAYWGQGTLVTVSSGGGGSGGGGSGGGGSQTVVTQEPSLTVSPGGTVTLTCGSSTGAVTSGNYPNWVQQKPGQAPRGLIGGTKFLAPGTPARFSGSLLGGKAALTLSGVQPEDEAEYYCVLWYSNRWVFGGGTKLTVL

SEQ ID NO: 1558 - protein, 120 aa, Artificial Sequence
  Synthetic peptide
QMQLQESGPGLVKPSETLSLTCTVSGGSIESGVYYWSWIRQPPGKGLEWIGYIYYSGSTSYNPSLKSRLTMSVDTSKNQFSLKLSSVTAADTAVYYCARSGYSYALFDYWGQGTLVTVSS

SEQ ID NO: 1559 - protein, 107 aa, Artificial Sequence
  Synthetic peptide
DIQMTQSPSSLSASLGDRVTITCRASQSVDRYFNWYQQKPGKAPKVLIFAASSLQSGVPSRFSGSGSGTDFTLTISSLQPEDFATYYCQQSYSTPWTFGQGTKVEVK

SEQ ID NO: 1560 - protein, 242 aa, Artificial Sequence
  Synthetic peptide
QMQLQESGPGLVKPSETLSLTCTVSGGSIESGVYYWSWIRQPPGKGLEWIGYIYYSGSTSYNPSLKSRLTMSVDTSKNQFSLKLSSVTAADTAVYYCARSGYSYALFDYWGQGTLVTVSSGGGGSGGGGSGGGGSDIQMTQSPSSLSASLGDRVTITCRASQSVDRYFNWYQQKPGKAPKVLIFAASSLQSGVPSRFSGSGSGTDFTLTISSLQPEDFATYYCQQSYSTPWTFGQGTKVEVK

SEQ ID NO: 1561 - protein, 497 aa, Artificial Sequence
  Synthetic peptide
QMQLQESGPGLVKPSETLSLTCTVSGGSIESGVYYWSWIRQPPGKGLEWIGYIYYSGSTSYNPSLKSRLTMSVDTSKNQFSLKLSSVTAADTAVYYCARSGYSYALFDYWGQGTLVTVSSGGGGSGGGGSGGGGSDIQMTQSPSSLSASLGDRVTITCRASQSVDRYFNWYQQKPGKAPKVLIFAASSLQSGVPSRFSGSGSGTDFTLTISSLQPEDFATYYCQQSYSTPWTFGQGTKVEVKSGGGGSEVQLVESGGGLVQPGGSLKLSCAASGFTFNKYAMNWVRQAPGKGLEWVARIRSKYNNYATYYADSVKDRFTISRDDSKNTAYLQMNNLKTEDTAVYYCVRHGNFGNSYISYWAYWGQGTLVTVSSGGGGSGGGGSGGGGSQTVVTQEPSLTVSPGGTVTLTCGSSTGAVTSGNYPNWVQQKPGQAPRGLIGGTKFLAPGTPARFSGSLLGGKAALTLSGVQPEDEAEYYCVLWYSNRWVFGGGTKLTVL

SEQ ID NO: 1562 - protein, 7 aa, Artificial Sequence
  Synthetic peptide
SGGYYWS

SEQ ID NO: 1563 - protein, 16 aa, Artificial Sequence
  Synthetic peptide
YIFYSGSTDYNPSLKS

SEQ ID NO: 1564 - protein, 10 aa, Artificial Sequence
  Synthetic peptide
SGYSYALFDA

SEQ ID NO: 1565 - protein, 11 aa, Artificial Sequence
  Synthetic peptide
RASQFIGRYFN

SEQ ID NO: 1566 - protein, 7 aa, Artificial Sequence
  Synthetic peptide
AESSLQS

SEQ ID NO: 1567 - protein, 9 aa, Artificial Sequence
  Synthetic peptide
QQSYSTPWT

SEQ ID NO: 1568 - protein, 120 aa, Artificial Sequence
  Synthetic peptide
QVQLQESGPGLVKPSQTLSLTCTVSGDSIISGGYYWSWIRQPPGKCLEWIGYIFYSGSTDYNPSLKSRVTISVDTSKNQFSLKLSSVTAADTAVYYCARSGYSYALFDAWGQGTLVTVSS

SEQ ID NO: 1569 - protein, 107 aa, Artificial Sequence
  Synthetic peptide
DIQMTQSPSSLSASVGDRVTISCRASQFIGRYFNWYQQKPGKAPKVLIYAESSLQSGVPSRFSGSGSGTEFTLTISSLQPEDFATYYCQQSYSTPWTFGCGTKVEIK

SEQ ID NO: 1570 - protein, 242 aa, Artificial Sequence
  Synthetic peptide
QVQLQESGPGLVKPSQTLSLTCTVSGDSIISGGYYWSWIRQPPGKCLEWIGYIFYSGSTDYNPSLKSRVTISVDTSKNQFSLKLSSVTAADTAVYYCARSGYSYALFDAWGQGTLVTVSSGGGGSGGGGSGGGGSDIQMTQSPSSLSASVGDRVTISCRASQFIGRYFNWYQQKPGKAPKVLIYAESSLQSGVPSRFSGSGSGTEFTLTISSLQPEDFATYYCQQSYSTPWTFGCGTKVEIK

SEQ ID NO: 1571 - protein, 497 aa, Artificial Sequence
  Synthetic peptide
QVQLQESGPGLVKPSQTLSLTCTVSGDSIISGGYYWSWIRQPPGKCLEWIGYIFYSGSTDYNPSLKSRVTISVDTSKNQFSLKLSSVTAADTAVYYCARSGYSYALFDAWGQGTLVTVSSGGGGSGGGGSGGGGSDIQMTQSPSSLSASVGDRVTISCRASQFIGRYFNWYQQKPGKAPKVLIYAESSLQSGVPSRFSGSGSGTEFTLTISSLQPEDFATYYCQQSYSTPWTFGCGTKVEIKSGGGGSEVQLVESGGGLVQPGGSLKLSCAASGFTFNKYAMNWVRQAPGKGLEWVARIRSKYNNYATYYADSVKDRFTISRDDSKNTAYLQMNNLKTEDTAVYYCVRHGNFGNSYISYWAYWGQGTLVTVSSGGGGSGGGGSGGGGSQTVVTQEPSLTVSPGGTVTLTCGSSTGAVTSGNYPNWVQQKPGQAPRGLIGGTKFLAPGTPARFSGSLLGGKAALTLSGVQPEDEAEYYCVLWYSNRWVFGGGTKLTVL

SEQ ID NO: 1572 - protein, 120 aa, Artificial Sequence
  Synthetic peptide
QVQLQESGPGLVKPSQTLSLTCTVSGDSIISGGYYWSWIRQPPGKGLEWIGYIFYSGSTDYNPSLKSRVTISVDTSKNQFSLKLSSVTAADTAVYYCARSGYSYALFDAWGQGTLVTVSS

SEQ ID NO: 1573 - protein, 107 aa, Artificial Sequence
  Synthetic peptide
DIQMTQSPSSLSASVGDRVTISCRASQFIGRYFNWYQQKPGKAPKVLIYAESSLQSGVPSRFSGSGSGTEFTLTISSLQPEDFATYYCQQSYSTPWTFGQGTKVEIK

SEQ ID NO: 1574 - protein, 242 aa, Artificial Sequence
  Synthetic peptide
QVQLQESGPGLVKPSQTLSLTCTVSGDSIISGGYYWSWIRQPPGKGLEWIGYIFYSGSTDYNPSLKSRVTISVDTSKNQFSLKLSSVTAADTAVYYCARSGYSYALFDAWGQGTLVTVSSGGGGSGGGGSGGGGSDIQMTQSPSSLSASVGDRVTISCRASQFIGRYFNWYQQKPGKAPKVLIYAESSLQSGVPSRFSGSGSGTEFTLTISSLQPEDFATYYCQQSYSTPWTFGQGTKVEIK

SEQ ID NO: 1575 - protein, 497 aa, Artificial Sequence
  Synthetic peptide
QVQLQESGPGLVKPSQTLSLTCTVSGDSIISGGYYWSWIRQPPGKGLEWIGYIFYSGSTDYNPSLKSRVTISVDTSKNQFSLKLSSVTAADTAVYYCARSGYSYALFDAWGQGTLVTVSSGGGGSGGGGSGGGGSDIQMTQSPSSLSASVGDRVTISCRASQFIGRYFNWYQQKPGKAPKVLIYAESSLQSGVPSRFSGSGSGTEFTLTISSLQPEDFATYYCQQSYSTPWTFGQGTKVEIKSGGGGSEVQLVESGGGLVQPGGSLKLSCAASGFTFNKYAMNWVRQAPGKGLEWVARIRSKYNNYATYYADSVKDRFTISRDDSKNTAYLQMNNLKTEDTAVYYCVRHGNFGNSYISYWAYWGQGTLVTVSSGGGGSGGGGSGGGGSQTVVTQEPSLTVSPGGTVTLTCGSSTGAVTSGNYPNWVQQKPGQAPRGLIGGTKFLAPGTPARFSGSLLGGKAALTLSGVQPEDEAEYYCVLWYSNRWVFGGGTKLTVL

SEQ ID NO: 1576 - protein, 986 aa, Artificial Sequence
  Synthetic peptide
EVQLLESGGGLVQPGGSLRLSCAASGFTFSSYAMSWVRQAPGKGLEWVSVISGSGGRPNYADSVKGRFTISRDNSKNTLYLQMNSLRDEDTAVYYCAKVDYSNYLFFDYWGQGTLVTVSSGGGGSGGGGSGGGGSEIVLTQSPGTLSLSPGEGATLSCRAGQSVRSSYLGWYQQKPGQAPRLLIYGASSRATGIPDRFSGSGSGTDFTLTISRLEPEDFAVYYCQQYGYSPPTFGGGTKLEIKSGGGGSEVQLVESGGGLVQPGGSLKLSCAASGFTFNKYAMNWVRQAPGKGLEWVARIRSKYNNYATYYADSVKDRFTISRDDSKNTAYLQMNNLKTEDTAVYYCVRHGNFGNSYISYWAYWGQGTLVTVSSGGGGSGGGGSGGGGSQTVVTQEPSLTVSPGGTVTLTCGSSTGAVTSGNYPNWVQQKPGQAPRGLIGGTKFLAPGTPARFSGSLLGGKAALTLSGVQPEDEAEYYCVLWYSNRWVFGGGTKLTVLGGGGDKTHTCPPCPAPELLGGPSVFLFPPKPKDTLMISRTPEVTCVVVDVSHEDPEVKFNWYVDGVEVHNAKTKPCEEQYGSTYRCVSVLTVLHQDWLNGKEYKCKVSNKALPAPIEKTISKAKGQPREPQVYTLPPSREEMTKNQVSLTCLVKGFYPSDIAVEWESNGQPENNYKTTPPVLDSDGSFFLYSKLTVDKSRWQQGNVFSCSVMHEALHNHYTQKSLSLSPGKGGGGSGGGGSGGGGSGGGGSGGGGSGGGGSDKTHTCPPCPAPELLGGPSVFLFPPKPKDTLMISRTPEVTCVVVDVSHEDPEVKFNWYVDGVEVHNAKTKPCEEQYGSTYRCVSVLTVLHQDWLNGKEYKCKVSNKALPAPIEKTISKAKGQPREPQVYTLPPSREEMTKNQVSLTCLVKGFYPSDIAVEWESNGQPENNYKTTPPVLDSDGSFFLYSKLTVDKSRWQQGNVFSCSVMHEALHNHYTQKSLSLSPGK

SEQ ID NO: 1577 - protein, 986 aa, Artificial Sequence
  Synthetic peptide
EVQLLESGGGLVQPGGSLRLSCAASGFTFSSYAMSWVRQAPGKCLEWVSVISGSGGRPNYADSVKGRFTISRDNSKNTLYLQMNSLRDEDTAVYYCAKVDYSNYLFFDYWGQGTLVTVSSGGGGSGGGGSGGGGSEIVLTQSPGTLSLSPGEGATLSCRAGQSVRSSYLGWYQQKPGQAPRLLIYGASSRATGIPDRFSGSGSGTDFTLTISRLEPEDFAVYYCQQYGYSPPTFGCGTKLEIKSGGGGSEVQLVESGGGLVQPGGSLKLSCAASGFTFNKYAMNWVRQAPGKGLEWVARIRSKYNNYATYYADSVKDRFTISRDDSKNTAYLQMNNLKTEDTAVYYCVRHGNFGNSYISYWAYWGQGTLVTVSSGGGGSGGGGSGGGGSQTVVTQEPSLTVSPGGTVTLTCGSSTGAVTSGNYPNWVQQKPGQAPRGLIGGTKFLAPGTPARFSGSLLGGKAALTLSGVQPEDEAEYYCVLWYSNRWVFGGGTKLTVLGGGGDKTHTCPPCPAPELLGGPSVFLFPPKPKDTLMISRTPEVTCVVVDVSHEDPEVKFNWYVDGVEVHNAKTKPCEEQYGSTYRCVSVLTVLHQDWLNGKEYKCKVSNKALPAPIEKTISKAKGQPREPQVYTLPPSREEMTKNQVSLTCLVKGFYPSDIAVEWESNGQPENNYKTTPPVLDSDGSFFLYSKLTVDKSRWQQGNVFSCSVMHEALHNHYTQKSLSLSPGKGGGGSGGGGSGGGGSGGGGSGGGGSGGGGSDKTHTCPPCPAPELLGGPSVFLFPPKPKDTLMISRTPEVTCVVVDVSHEDPEVKFNWYVDGVEVHNAKTKPCEEQYGSTYRCVSVLTVLHQDWLNGKEYKCKVSNKALPAPIEKTISKAKGQPREPQVYTLPPSREEMTKNQVSLTCLVKGFYPSDIAVEWESNGQPENNYKTTPPVLDSDGSFFLYSKLTVDKSRWQQGNVFSCSVMHEALHNHYTQKSLSLSPGK

SEQ ID NO: 1578 - protein, 986 aa, Artificial Sequence
  Synthetic peptide
EVQLLESGGGLVQPGGSLKLSCAASGFTFSIYAMSWVRQAPGKGLEWVSAISGSGGSTFYADSVKGRFTISRDNSKNTLYLQMNSLRAEDTAVYYCAKHDYSNYPYFDYWGQGTLVTVSSGGGGSGGGGSGGGGSEIVLTQSPGTLSLSPGERATLSCRASQSVRSSYLAWYQQKPGQAPRLLIYGASSRATGIPDRFSGSGSGTDFTLTISRLEPEDFAVYYCQQYGDLPFTFGPGTKLEIKSGGGGSEVQLVESGGGLVQPGGSLKLSCAASGFTFNKYAMNWVRQAPGKGLEWVARIRSKYNNYATYYADSVKDRFTISRDDSKNTAYLQMNNLKTEDTAVYYCVRHGNFGNSYISYWAYWGQGTLVTVSSGGGGSGGGGSGGGGSQTVVTQEPSLTVSPGGTVTLTCGSSTGAVTSGNYPNWVQQKPGQAPRGLIGGTKFLAPGTPARFSGSLLGGKAALTLSGVQPEDEAEYYCVLWYSNRWVFGGGTKLTVLGGGGDKTHTCPPCPAPELLGGPSVFLFPPKPKDTLMISRTPEVTCVVVDVSHEDPEVKFNWYVDGVEVHNAKTKPCEEQYGSTYRCVSVLTVLHQDWLNGKEYKCKVSNKALPAPIEKTISKAKGQPREPQVYTLPPSREEMTKNQVSLTCLVKGFYPSDIAVEWESNGQPENNYKTTPPVLDSDGSFFLYSKLTVDKSRWQQGNVFSCSVMHEALHNHYTQKSLSLSPGKGGGGSGGGGSGGGGSGGGGSGGGGSGGGGSDKTHTCPPCPAPELLGGPSVFLFPPKPKDTLMISRTPEVTCVVVDVSHEDPEVKFNWYVDGVEVHNAKTKPCEEQYGSTYRCVSVLTVLHQDWLNGKEYKCKVSNKALPAPIEKTISKAKGQPREPQVYTLPPSREEMTKNQVSLTCLVKGFYPSDIAVEWESNGQPENNYKTTPPVLDSDGSFFLYSKLTVDKSRWQQGNVFSCSVMHEALHNHYTQKSLSLSPGK

SEQ ID NO: 1579 - protein, 986 aa, Artificial Sequence
  Synthetic peptide
EVQLLESGGGLVQPGGSLKLSCAASGFTFSIYAMSWVRQAPGKCLEWVSAISGSGGSTFYADSVKGRFTISRDNSKNTLYLQMNSLRAEDTAVYYCAKHDYSNYPYFDYWGQGTLVTVSSGGGGSGGGGSGGGGSEIVLTQSPGTLSLSPGERATLSCRASQSVRSSYLAWYQQKPGQAPRLLIYGASSRATGIPDRFSGSGSGTDFTLTISRLEPEDFAVYYCQQYGDLPFTFGCGTKLEIKSGGGGSEVQLVESGGGLVQPGGSLKLSCAASGFTFNKYAMNWVRQAPGKGLEWVARIRSKYNNYATYYADSVKDRFTISRDDSKNTAYLQMNNLKTEDTAVYYCVRHGNFGNSYISYWAYWGQGTLVTVSSGGGGSGGGGSGGGGSQTVVTQEPSLTVSPGGTVTLTCGSSTGAVTSGNYPNWVQQKPGQAPRGLIGGTKFLAPGTPARFSGSLLGGKAALTLSGVQPEDEAEYYCVLWYSNRWVFGGGTKLTVLGGGGDKTHTCPPCPAPELLGGPSVFLFPPKPKDTLMISRTPEVTCVVVDVSHEDPEVKFNWYVDGVEVHNAKTKPCEEQYGSTYRCVSVLTVLHQDWLNGKEYKCKVSNKALPAPIEKTISKAKGQPREPQVYTLPPSREEMTKNQVSLTCLVKGFYPSDIAVEWESNGQPENNYKTTPPVLDSDGSFFLYSKLTVDKSRWQQGNVFSCSVMHEALHNHYTQKSLSLSPGKGGGGSGGGGSGGGGSGGGGSGGGGSGGGGSDKTHTCPPCPAPELLGGPSVFLFPPKPKDTLMISRTPEVTCVVVDVSHEDPEVKFNWYVDGVEVHNAKTKPCEEQYGSTYRCVSVLTVLHQDWLNGKEYKCKVSNKALPAPIEKTISKAKGQPREPQVYTLPPSREEMTKNQVSLTCLVKGFYPSDIAVEWESNGQPENNYKTTPPVLDSDGSFFLYSKLTVDKSRWQQGNVFSCSVMHEALHNHYTQKSLSLSPGK

SEQ ID NO: 1580 - protein, 986 aa, Artificial Sequence
  Synthetic peptide
EVQLLESGGGMVQPGGSLRLSCAASGFTFSSYAMSWVRQAPGKGLEWVSAISGSGGRTFYADSVEGRFTISRDNSKNTLFLQMNSLRAEDTAVYYCAKHDYSNYPYFDYWGQGTLVTVSSGGGGSGGGGSGGGGSEIVLTQSPGTLSLSPGERATLSCRASQSVRSSYLAWYQQKPGQAPRLLIYGASSRATGIPDRFSGSGSGTDFTLTISRLEPEDFAVYYCQQYGSSPFTFGPGTKLEIKSGGGGSEVQLVESGGGLVQPGGSLKLSCAASGFTFNKYAMNWVRQAPGKGLEWVARIRSKYNNYATYYADSVKDRFTISRDDSKNTAYLQMNNLKTEDTAVYYCVRHGNFGNSYISYWAYWGQGTLVTVSSGGGGSGGGGSGGGGSQTVVTQEPSLTVSPGGTVTLTCGSSTGAVTSGNYPNWVQQKPGQAPRGLIGGTKFLAPGTPARFSGSLLGGKAALTLSGVQPEDEAEYYCVLWYSNRWVFGGGTKLTVLGGGGDKTHTCPPCPAPELLGGPSVFLFPPKPKDTLMISRTPEVTCVVVDVSHEDPEVKFNWYVDGVEVHNAKTKPCEEQYGSTYRCVSVLTVLHQDWLNGKEYKCKVSNKALPAPIEKTISKAKGQPREPQVYTLPPSREEMTKNQVSLTCLVKGFYPSDIAVEWESNGQPENNYKTTPPVLDSDGSFFLYSKLTVDKSRWQQGNVFSCSVMHEALHNHYTQKSLSLSPGKGGGGSGGGGSGGGGSGGGGSGGGGSGGGGSDKTHTCPPCPAPELLGGPSVFLFPPKPKDTLMISRTPEVTCVVVDVSHEDPEVKFNWYVDGVEVHNAKTKPCEEQYGSTYRCVSVLTVLHQDWLNGKEYKCKVSNKALPAPIEKTISKAKGQPREPQVYTLPPSREEMTKNQVSLTCLVKGFYPSDIAVEWESNGQPENNYKTTPPVLDSDGSFFLYSKLTVDKSRWQQGNVFSCSVMHEALHNHYTQKSLSLSPGK

SEQ ID NO: 1581 - protein, 986 aa, Artificial Sequence
  Synthetic peptide
EVQLLESGGGMVQPGGSLRLSCAASGFTFSSYAMSWVRQAPGKCLEWVSAISGSGGRTFYADSVEGRFTISRDNSKNTLFLQMNSLRAEDTAVYYCAKHDYSNYPYFDYWGQGTLVTVSSGGGGSGGGGSGGGGSEIVLTQSPGTLSLSPGERATLSCRASQSVRSSYLAWYQQKPGQAPRLLIYGASSRATGIPDRFSGSGSGTDFTLTISRLEPEDFAVYYCQQYGSSPFTFGCGTKLEIKSGGGGSEVQLVESGGGLVQPGGSLKLSCAASGFTFNKYAMNWVRQAPGKGLEWVARIRSKYNNYATYYADSVKDRFTISRDDSKNTAYLQMNNLKTEDTAVYYCVRHGNFGNSYISYWAYWGQGTLVTVSSGGGGSGGGGSGGGGSQTVVTQEPSLTVSPGGTVTLTCGSSTGAVTSGNYPNWVQQKPGQAPRGLIGGTKFLAPGTPARFSGSLLGGKAALTLSGVQPEDEAEYYCVLWYSNRWVFGGGTKLTVLGGGGDKTHTCPPCPAPELLGGPSVFLFPPKPKDTLMISRTPEVTCVVVDVSHEDPEVKFNWYVDGVEVHNAKTKPCEEQYGSTYRCVSVLTVLHQDWLNGKEYKCKVSNKALPAPIEKTISKAKGQPREPQVYTLPPSREEMTKNQVSLTCLVKGFYPSDIAVEWESNGQPENNYKTTPPVLDSDGSFFLYSKLTVDKSRWQQGNVFSCSVMHEALHNHYTQKSLSLSPGKGGGGSGGGGSGGGGSGGGGSGGGGSGGGGSDKTHTCPPCPAPELLGGPSVFLFPPKPKDTLMISRTPEVTCVVVDVSHEDPEVKFNWYVDGVEVHNAKTKPCEEQYGSTYRCVSVLTVLHQDWLNGKEYKCKVSNKALPAPIEKTISKAKGQPREPQVYTLPPSREEMTKNQVSLTCLVKGFYPSDIAVEWESNGQPENNYKTTPPVLDSDGSFFLYSKLTVDKSRWQQGNVFSCSVMHEALHNHYTQKSLSLSPGK

SEQ ID NO: 1582 - protein, 986 aa, Artificial Sequence
  Synthetic peptide
EVQLLESGGGMVQPGGSLRLSCAASGFTFSSYAMSWVRQAPGKGLEWVSAISGSGGRTFYADSVEGRFTISRDNSKNTLYLQMNSLRAEDTAVYYCAKHDYSNYPYFDYWGQGTLVTVSSGGGGSGGGGSGGGGSEIVLTQSPGTLSLSPGERATLSCRASQSIRSSYLAWYQQKPGQAPRLLIYGASSRATGIPDRFSGSGSGTDFTLTISRLEPEDFAVYYCQQYGDLPFTFGPGTKLEIKSGGGGSEVQLVESGGGLVQPGGSLKLSCAASGFTFNKYAMNWVRQAPGKGLEWVARIRSKYNNYATYYADSVKDRFTISRDDSKNTAYLQMNNLKTEDTAVYYCVRHGNFGNSYISYWAYWGQGTLVTVSSGGGGSGGGGSGGGGSQTVVTQEPSLTVSPGGTVTLTCGSSTGAVTSGNYPNWVQQKPGQAPRGLIGGTKFLAPGTPARFSGSLLGGKAALTLSGVQPEDEAEYYCVLWYSNRWVFGGGTKLTVLGGGGDKTHTCPPCPAPELLGGPSVFLFPPKPKDTLMISRTPEVTCVVVDVSHEDPEVKFNWYVDGVEVHNAKTKPCEEQYGSTYRCVSVLTVLHQDWLNGKEYKCKVSNKALPAPIEKTISKAKGQPREPQVYTLPPSREEMTKNQVSLTCLVKGFYPSDIAVEWESNGQPENNYKTTPPVLDSDGSFFLYSKLTVDKSRWQQGNVFSCSVMHEALHNHYTQKSLSLSPGKGGGGSGGGGSGGGGSGGGGSGGGGSGGGGSDKTHTCPPCPAPELLGGPSVFLFPPKPKDTLMISRTPEVTCVVVDVSHEDPEVKFNWYVDGVEVHNAKTKPCEEQYGSTYRCVSVLTVLHQDWLNGKEYKCKVSNKALPAPIEKTISKAKGQPREPQVYTLPPSREEMTKNQVSLTCLVKGFYPSDIAVEWESNGQPENNYKTTPPVLDSDGSFFLYSKLTVDKSRWQQGNVFSCSVMHEALHNHYTQKSLSLSPGK

SEQ ID NO: 1583 - protein, 986 aa, Artificial Sequence
  Synthetic peptide
EVQLLESGGGMVQPGGSLRLSCAASGFTFSSYAMSWVRQAPGKCLEWVSAISGSGGRTFYADSVEGRFTISRDNSKNTLYLQMNSLRAEDTAVYYCAKHDYSNYPYFDYWGQGTLVTVSSGGGGSGGGGSGGGGSEIVLTQSPGTLSLSPGERATLSCRASQSIRSSYLAWYQQKPGQAPRLLIYGASSRATGIPDRFSGSGSGTDFTLTISRLEPEDFAVYYCQQYGDLPFTFGCGTKLEIKSGGGGSEVQLVESGGGLVQPGGSLKLSCAASGFTFNKYAMNWVRQAPGKGLEWVARIRSKYNNYATYYADSVKDRFTISRDDSKNTAYLQMNNLKTEDTAVYYCVRHGNFGNSYISYWAYWGQGTLVTVSSGGGGSGGGGSGGGGSQTVVTQEPSLTVSPGGTVTLTCGSSTGAVTSGNYPNWVQQKPGQAPRGLIGGTKFLAPGTPARFSGSLLGGKAALTLSGVQPEDEAEYYCVLWYSNRWVFGGGTKLTVLGGGGDKTHTCPPCPAPELLGGPSVFLFPPKPKDTLMISRTPEVTCVVVDVSHEDPEVKFNWYVDGVEVHNAKTKPCEEQYGSTYRCVSVLTVLHQDWLNGKEYKCKVSNKALPAPIEKTISKAKGQPREPQVYTLPPSREEMTKNQVSLTCLVKGFYPSDIAVEWESNGQPENNYKTTPPVLDSDGSFFLYSKLTVDKSRWQQGNVFSCSVMHEALHNHYTQKSLSLSPGKGGGGSGGGGSGGGGSGGGGSGGGGSGGGGSDKTHTCPPCPAPELLGGPSVFLFPPKPKDTLMISRTPEVTCVVVDVSHEDPEVKFNWYVDGVEVHNAKTKPCEEQYGSTYRCVSVLTVLHQDWLNGKEYKCKVSNKALPAPIEKTISKAKGQPREPQVYTLPPSREEMTKNQVSLTCLVKGFYPSDIAVEWESNGQPENNYKTTPPVLDSDGSFFLYSKLTVDKSRWQQGNVFSCSVMHEALHNHYTQKSLSLSPGK

SEQ ID NO: 1584 - protein, 986 aa, Artificial Sequence
  Synthetic peptide
EVQLLESGGGLVQSGGSLRLSCAASGFTFSSYAMSWVRQAPGKGLEWVSAISGSGGRTHYADSVKGRFTISRDNSKNTLYLQMNSLRAEDTAVYYCAKHDYSNYPYFDYWGQGTLVTVSSGGGGSGGGGSGGGGSEIVLTQSPGTLSLSPGERATLSCRASQSVRSSYLAWYQQKPGQAPRLLIYGASSRATGIPDRFSGSGSGTDFTLTISRLEPEDFAVYYCQQYGSSPFTFGPGTKLEIKSGGGGSEVQLVESGGGLVQPGGSLKLSCAASGFTFNKYAMNWVRQAPGKGLEWVARIRSKYNNYATYYADSVKDRFTISRDDSKNTAYLQMNNLKTEDTAVYYCVRHGNFGNSYISYWAYWGQGTLVTVSSGGGGSGGGGSGGGGSQTVVTQEPSLTVSPGGTVTLTCGSSTGAVTSGNYPNWVQQKPGQAPRGLIGGTKFLAPGTPARFSGSLLGGKAALTLSGVQPEDEAEYYCVLWYSNRWVFGGGTKLTVLGGGGDKTHTCPPCPAPELLGGPSVFLFPPKPKDTLMISRTPEVTCVVVDVSHEDPEVKFNWYVDGVEVHNAKTKPCEEQYGSTYRCVSVLTVLHQDWLNGKEYKCKVSNKALPAPIEKTISKAKGQPREPQVYTLPPSREEMTKNQVSLTCLVKGFYPSDIAVEWESNGQPENNYKTTPPVLDSDGSFFLYSKLTVDKSRWQQGNVFSCSVMHEALHNHYTQKSLSLSPGKGGGGSGGGGSGGGGSGGGGSGGGGSGGGGSDKTHTCPPCPAPELLGGPSVFLFPPKPKDTLMISRTPEVTCVVVDVSHEDPEVKFNWYVDGVEVHNAKTKPCEEQYGSTYRCVSVLTVLHQDWLNGKEYKCKVSNKALPAPIEKTISKAKGQPREPQVYTLPPSREEMTKNQVSLTCLVKGFYPSDIAVEWESNGQPENNYKTTPPVLDSDGSFFLYSKLTVDKSRWQQGNVFSCSVMHEALHNHYTQKSLSLSPGK

SEQ ID NO: 1585 - protein, 986 aa, Artificial Sequence
  Synthetic peptide
EVQLLESGGGLVQSGGSLRLSCAASGFTFSSYAMSWVRQAPGKCLEWVSAISGSGGRTHYADSVKGRFTISRDNSKNTLYLQMNSLRAEDTAVYYCAKHDYSNYPYFDYWGQGTLVTVSSGGGGSGGGGSGGGGSEIVLTQSPGTLSLSPGERATLSCRASQSVRSSYLAWYQQKPGQAPRLLIYGASSRATGIPDRFSGSGSGTDFTLTISRLEPEDFAVYYCQQYGSSPFTFGCGTKLEIKSGGGGSEVQLVESGGGLVQPGGSLKLSCAASGFTFNKYAMNWVRQAPGKGLEWVARIRSKYNNYATYYADSVKDRFTISRDDSKNTAYLQMNNLKTEDTAVYYCVRHGNFGNSYISYWAYWGQGTLVTVSSGGGGSGGGGSGGGGSQTVVTQEPSLTVSPGGTVTLTCGSSTGAVTSGNYPNWVQQKPGQAPRGLIGGTKFLAPGTPARFSGSLLGGKAALTLSGVQPEDEAEYYCVLWYSNRWVFGGGTKLTVLGGGGDKTHTCPPCPAPELLGGPSVFLFPPKPKDTLMISRTPEVTCVVVDVSHEDPEVKFNWYVDGVEVHNAKTKPCEEQYGSTYRCVSVLTVLHQDWLNGKEYKCKVSNKALPAPIEKTISKAKGQPREPQVYTLPPSREEMTKNQVSLTCLVKGFYPSDIAVEWESNGQPENNYKTTPPVLDSDGSFFLYSKLTVDKSRWQQGNVFSCSVMHEALHNHYTQKSLSLSPGKGGGGSGGGGSGGGGSGGGGSGGGGSGGGGSDKTHTCPPCPAPELLGGPSVFLFPPKPKDTLMISRTPEVTCVVVDVSHEDPEVKFNWYVDGVEVHNAKTKPCEEQYGSTYRCVSVLTVLHQDWLNGKEYKCKVSNKALPAPIEKTISKAKGQPREPQVYTLPPSREEMTKNQVSLTCLVKGFYPSDIAVEWESNGQPENNYKTTPPVLDSDGSFFLYSKLTVDKSRWQQGNVFSCSVMHEALHNHYTQKSLSLSPGK

SEQ ID NO: 1586 - protein, 986 aa, Artificial Sequence
  Synthetic peptide
EVQLLESGGGLVQPGGSLRLSCAASGFTFSSYAMSWVRQAPGKGLEWVSLISGSGGRTHYADSVKGRFTISRDNSKNTLYLQMNSLRAEDTAVYYCAKHDYSNYPYFDYWGQGTLVTVSSGGGGSGGGGSGGGGSEIVLTQSPGTLSLSPGERATLSCRASQSVRSTYLAWYQQKPGQAPRLLIYDASSRATGIPDRFSGSGSGTDFTLTISRLEPEDFAVYFCQQYGSSPPTFGGGTKLEIKSGGGGSEVQLVESGGGLVQPGGSLKLSCAASGFTFNKYAMNWVRQAPGKGLEWVARIRSKYNNYATYYADSVKDRFTISRDDSKNTAYLQMNNLKTEDTAVYYCVRHGNFGNSYISYWAYWGQGTLVTVSSGGGGSGGGGSGGGGSQTVVTQEPSLTVSPGGTVTLTCGSSTGAVTSGNYPNWVQQKPGQAPRGLIGGTKFLAPGTPARFSGSLLGGKAALTLSGVQPEDEAEYYCVLWYSNRWVFGGGTKLTVLGGGGDKTHTCPPCPAPELLGGPSVFLFPPKPKDTLMISRTPEVTCVVVDVSHEDPEVKFNWYVDGVEVHNAKTKPCEEQYGSTYRCVSVLTVLHQDWLNGKEYKCKVSNKALPAPIEKTISKAKGQPREPQVYTLPPSREEMTKNQVSLTCLVKGFYPSDIAVEWESNGQPENNYKTTPPVLDSDGSFFLYSKLTVDKSRWQQGNVFSCSVMHEALHNHYTQKSLSLSPGKGGGGSGGGGSGGGGSGGGGSGGGGSGGGGSDKTHTCPPCPAPELLGGPSVFLFPPKPKDTLMISRTPEVTCVVVDVSHEDPEVKFNWYVDGVEVHNAKTKPCEEQYGSTYRCVSVLTVLHQDWLNGKEYKCKVSNKALPAPIEKTISKAKGQPREPQVYTLPPSREEMTKNQVSLTCLVKGFYPSDIAVEWESNGQPENNYKTTPPVLDSDGSFFLYSKLTVDKSRWQQGNVFSCSVMHEALHNHYTQKSLSLSPGK

SEQ ID NO: 1587 - protein, 986 aa, Artificial Sequence
  Synthetic peptide
EVQLLESGGGLVQPGGSLRLSCAASGFTFSSYAMSWVRQAPGKCLEWVSLISGSGGRTHYADSVKGRFTISRDNSKNTLYLQMNSLRAEDTAVYYCAKHDYSNYPYFDYWGQGTLVTVSSGGGGSGGGGSGGGGSEIVLTQSPGTLSLSPGERATLSCRASQSVRSTYLAWYQQKPGQAPRLLIYDASSRATGIPDRFSGSGSGTDFTLTISRLEPEDFAVYFCQQYGSSPPTFGCGTKLEIKSGGGGSEVQLVESGGGLVQPGGSLKLSCAASGFTFNKYAMNWVRQAPGKGLEWVARIRSKYNNYATYYADSVKDRFTISRDDSKNTAYLQMNNLKTEDTAVYYCVRHGNFGNSYISYWAYWGQGTLVTVSSGGGGSGGGGSGGGGSQTVVTQEPSLTVSPGGTVTLTCGSSTGAVTSGNYPNWVQQKPGQAPRGLIGGTKFLAPGTPARFSGSLLGGKAALTLSGVQPEDEAEYYCVLWYSNRWVFGGGTKLTVLGGGGDKTHTCPPCPAPELLGGPSVFLFPPKPKDTLMISRTPEVTCVVVDVSHEDPEVKFNWYVDGVEVHNAKTKPCEEQYGSTYRCVSVLTVLHQDWLNGKEYKCKVSNKALPAPIEKTISKAKGQPREPQVYTLPPSREEMTKNQVSLTCLVKGFYPSDIAVEWESNGQPENNYKTTPPVLDSDGSFFLYSKLTVDKSRWQQGNVFSCSVMHEALHNHYTQKSLSLSPGKGGGGSGGGGSGGGGSGGGGSGGGGSGGGGSDKTHTCPPCPAPELLGGPSVFLFPPKPKDTLMISRTPEVTCVVVDVSHEDPEVKFNWYVDGVEVHNAKTKPCEEQYGSTYRCVSVLTVLHQDWLNGKEYKCKVSNKALPAPIEKTISKAKGQPREPQVYTLPPSREEMTKNQVSLTCLVKGFYPSDIAVEWESNGQPENNYKTTPPVLDSDGSFFLYSKLTVDKSRWQQGNVFSCSVMHEALHNHYTQKSLSLSPGK

SEQ ID NO: 1588 - protein, 986 aa, Artificial Sequence
  Synthetic peptide
EVQLLESGGGLVQPGGSLRLSCAASGFTFSTYAMSWVRQAPGKGLEWVSAISGSGGSTFYADSVKGRFTISRDNSKNTLSLQMNSLRAEDTAVYYCAKHDYSNYPYFDYWGQGTLVTVSSGGGGSGGGGSGGGGSEIVLTQSPGTLSLSPGERATLSCRASQSVRSSYLAWYQQKPGQAPRLLIYGASSRATGIPDRFSGSGSGTDFTLTISRLEPEDFAVYYCQQYGDLPFTFGPGTKLEIKSGGGGSEVQLVESGGGLVQPGGSLKLSCAASGFTFNKYAMNWVRQAPGKGLEWVARIRSKYNNYATYYADSVKDRFTISRDDSKNTAYLQMNNLKTEDTAVYYCVRHGNFGNSYISYWAYWGQGTLVTVSSGGGGSGGGGSGGGGSQTVVTQEPSLTVSPGGTVTLTCGSSTGAVTSGNYPNWVQQKPGQAPRGLIGGTKFLAPGTPARFSGSLLGGKAALTLSGVQPEDEAEYYCVLWYSNRWVFGGGTKLTVLGGGGDKTHTCPPCPAPELLGGPSVFLFPPKPKDTLMISRTPEVTCVVVDVSHEDPEVKFNWYVDGVEVHNAKTKPCEEQYGSTYRCVSVLTVLHQDWLNGKEYKCKVSNKALPAPIEKTISKAKGQPREPQVYTLPPSREEMTKNQVSLTCLVKGFYPSDIAVEWESNGQPENNYKTTPPVLDSDGSFFLYSKLTVDKSRWQQGNVFSCSVMHEALHNHYTQKSLSLSPGKGGGGSGGGGSGGGGSGGGGSGGGGSGGGGSDKTHTCPPCPAPELLGGPSVFLFPPKPKDTLMISRTPEVTCVVVDVSHEDPEVKFNWYVDGVEVHNAKTKPCEEQYGSTYRCVSVLTVLHQDWLNGKEYKCKVSNKALPAPIEKTISKAKGQPREPQVYTLPPSREEMTKNQVSLTCLVKGFYPSDIAVEWESNGQPENNYKTTPPVLDSDGSFFLYSKLTVDKSRWQQGNVFSCSVMHEALHNHYTQKSLSLSPGK

SEQ ID NO: 1589 - protein, 986 aa, Artificial Sequence
  Synthetic peptide
EVQLLESGGGLVQPGGSLRLSCAASGFTFSTYAMSWVRQAPGKCLEWVSAISGSGGSTFYADSVKGRFTISRDNSKNTLSLQMNSLRAEDTAVYYCAKHDYSNYPYFDYWGQGTLVTVSSGGGGSGGGGSGGGGSEIVLTQSPGTLSLSPGERATLSCRASQSVRSSYLAWYQQKPGQAPRLLIYGASSRATGIPDRFSGSGSGTDFTLTISRLEPEDFAVYYCQQYGDLPFTFGCGTKLEIKSGGGGSEVQLVESGGGLVQPGGSLKLSCAASGFTFNKYAMNWVRQAPGKGLEWVARIRSKYNNYATYYADSVKDRFTISRDDSKNTAYLQMNNLKTEDTAVYYCVRHGNFGNSYISYWAYWGQGTLVTVSSGGGGSGGGGSGGGGSQTVVTQEPSLTVSPGGTVTLTCGSSTGAVTSGNYPNWVQQKPGQAPRGLIGGTKFLAPGTPARFSGSLLGGKAALTLSGVQPEDEAEYYCVLWYSNRWVFGGGTKLTVLGGGGDKTHTCPPCPAPELLGGPSVFLFPPKPKDTLMISRTPEVTCVVVDVSHEDPEVKFNWYVDGVEVHNAKTKPCEEQYGSTYRCVSVLTVLHQDWLNGKEYKCKVSNKALPAPIEKTISKAKGQPREPQVYTLPPSREEMTKNQVSLTCLVKGFYPSDIAVEWESNGQPENNYKTTPPVLDSDGSFFLYSKLTVDKSRWQQGNVFSCSVMHEALHNHYTQKSLSLSPGKGGGGSGGGGSGGGGSGGGGSGGGGSGGGGSDKTHTCPPCPAPELLGGPSVFLFPPKPKDTLMISRTPEVTCVVVDVSHEDPEVKFNWYVDGVEVHNAKTKPCEEQYGSTYRCVSVLTVLHQDWLNGKEYKCKVSNKALPAPIEKTISKAKGQPREPQVYTLPPSREEMTKNQVSLTCLVKGFYPSDIAVEWESNGQPENNYKTTPPVLDSDGSFFLYSKLTVDKSRWQQGNVFSCSVMHEALHNHYTQKSLSLSPGK

SEQ ID NO: 1590 - protein, 986 aa, Artificial Sequence
  Synthetic peptide
EVQLLESGGGMVQPGGSLRLSCAASGFTFSTYAMSWVRQAPGKGLEWVSAISGSGGRTFYADSVEGRFTISRDNSKNTLYLQMNSLRAEDTAVYYCAKHDYSNYPYFDYWGQGTLVTVSSGGGGSGGGGSGGGGSEIVLTQSPGTLSLSPGERATLSCRASQSVRSTYLAWYQQKPGQAPRLLIYGASSRATGIPDRFSGSGSGTDFTLTISRLEPEDFAVYSCQQYGDLPFTFGPGTKLEIKSGGGGSEVQLVESGGGLVQPGGSLKLSCAASGFTFNKYAMNWVRQAPGKGLEWVARIRSKYNNYATYYADSVKDRFTISRDDSKNTAYLQMNNLKTEDTAVYYCVRHGNFGNSYISYWAYWGQGTLVTVSSGGGGSGGGGSGGGGSQTVVTQEPSLTVSPGGTVTLTCGSSTGAVTSGNYPNWVQQKPGQAPRGLIGGTKFLAPGTPARFSGSLLGGKAALTLSGVQPEDEAEYYCVLWYSNRWVFGGGTKLTVLGGGGDKTHTCPPCPAPELLGGPSVFLFPPKPKDTLMISRTPEVTCVVVDVSHEDPEVKFNWYVDGVEVHNAKTKPCEEQYGSTYRCVSVLTVLHQDWLNGKEYKCKVSNKALPAPIEKTISKAKGQPREPQVYTLPPSREEMTKNQVSLTCLVKGFYPSDIAVEWESNGQPENNYKTTPPVLDSDGSFFLYSKLTVDKSRWQQGNVFSCSVMHEALHNHYTQKSLSLSPGKGGGGSGGGGSGGGGSGGGGSGGGGSGGGGSDKTHTCPPCPAPELLGGPSVFLFPPKPKDTLMISRTPEVTCVVVDVSHEDPEVKFNWYVDGVEVHNAKTKPCEEQYGSTYRCVSVLTVLHQDWLNGKEYKCKVSNKALPAPIEKTISKAKGQPREPQVYTLPPSREEMTKNQVSLTCLVKGFYPSDIAVEWESNGQPENNYKTTPPVLDSDGSFFLYSKLTVDKSRWQQGNVFSCSVMHEALHNHYTQKSLSLSPGK

SEQ ID NO: 1591 - protein, 986 aa, Artificial Sequence
  Synthetic peptide
EVQLLESGGGMVQPGGSLRLSCAASGFTFSTYAMSWVRQAPGKCLEWVSAISGSGGRTFYADSVEGRFTISRDNSKNTLYLQMNSLRAEDTAVYYCAKHDYSNYPYFDYWGQGTLVTVSSGGGGSGGGGSGGGGSEIVLTQSPGTLSLSPGERATLSCRASQSVRSTYLAWYQQKPGQAPRLLIYGASSRATGIPDRFSGSGSGTDFTLTISRLEPEDFAVYSCQQYGDLPFTFGCGTKLEIKSGGGGSEVQLVESGGGLVQPGGSLKLSCAASGFTFNKYAMNWVRQAPGKGLEWVARIRSKYNNYATYYADSVKDRFTISRDDSKNTAYLQMNNLKTEDTAVYYCVRHGNFGNSYISYWAYWGQGTLVTVSSGGGGSGGGGSGGGGSQTVVTQEPSLTVSPGGTVTLTCGSSTGAVTSGNYPNWVQQKPGQAPRGLIGGTKFLAPGTPARFSGSLLGGKAALTLSGVQPEDEAEYYCVLWYSNRWVFGGGTKLTVLGGGGDKTHTCPPCPAPELLGGPSVFLFPPKPKDTLMISRTPEVTCVVVDVSHEDPEVKFNWYVDGVEVHNAKTKPCEEQYGSTYRCVSVLTVLHQDWLNGKEYKCKVSNKALPAPIEKTISKAKGQPREPQVYTLPPSREEMTKNQVSLTCLVKGFYPSDIAVEWESNGQPENNYKTTPPVLDSDGSFFLYSKLTVDKSRWQQGNVFSCSVMHEALHNHYTQKSLSLSPGKGGGGSGGGGSGGGGSGGGGSGGGGSGGGGSDKTHTCPPCPAPELLGGPSVFLFPPKPKDTLMISRTPEVTCVVVDVSHEDPEVKFNWYVDGVEVHNAKTKPCEEQYGSTYRCVSVLTVLHQDWLNGKEYKCKVSNKALPAPIEKTISKAKGQPREPQVYTLPPSREEMTKNQVSLTCLVKGFYPSDIAVEWESNGQPENNYKTTPPVLDSDGSFFLYSKLTVDKSRWQQGNVFSCSVMHEALHNHYTQKSLSLSPGK

SEQ ID NO: 1592 - protein, 986 aa, Artificial Sequence
  Synthetic peptide
EVQLLESGGGLVQPGGSLRLSCAASGFTFSSYAMSWVRQAPGKGLEWVSAISGSGGYTYYADSVKGRFTISRDNSKNTLYLQMNSLRAEDTAVYYCAKHDYSNYPYFDYWGQGTLVTVSSGGGGSGGGGSGGGGSEIVLTQSPGTLSLSPGERATLSCRASQSVRSNYLAWYQQKPGQAPRLLIYGASSRATGIPDRFSGSGSGTDFTLTISRLEPEDFAVYYCQQYGDLPFTFGPGTKVEIKSGGGGSEVQLVESGGGLVQPGGSLKLSCAASGFTFNKYAMNWVRQAPGKGLEWVARIRSKYNNYATYYADSVKDRFTISRDDSKNTAYLQMNNLKTEDTAVYYCVRHGNFGNSYISYWAYWGQGTLVTVSSGGGGSGGGGSGGGGSQTVVTQEPSLTVSPGGTVTLTCGSSTGAVTSGNYPNWVQQKPGQAPRGLIGGTKFLAPGTPARFSGSLLGGKAALTLSGVQPEDEAEYYCVLWYSNRWVFGGGTKLTVLGGGGDKTHTCPPCPAPELLGGPSVFLFPPKPKDTLMISRTPEVTCVVVDVSHEDPEVKFNWYVDGVEVHNAKTKPCEEQYGSTYRCVSVLTVLHQDWLNGKEYKCKVSNKALPAPIEKTISKAKGQPREPQVYTLPPSREEMTKNQVSLTCLVKGFYPSDIAVEWESNGQPENNYKTTPPVLDSDGSFFLYSKLTVDKSRWQQGNVFSCSVMHEALHNHYTQKSLSLSPGKGGGGSGGGGSGGGGSGGGGSGGGGSGGGGSDKTHTCPPCPAPELLGGPSVFLFPPKPKDTLMISRTPEVTCVVVDVSHEDPEVKFNWYVDGVEVHNAKTKPCEEQYGSTYRCVSVLTVLHQDWLNGKEYKCKVSNKALPAPIEKTISKAKGQPREPQVYTLPPSREEMTKNQVSLTCLVKGFYPSDIAVEWESNGQPENNYKTTPPVLDSDGSFFLYSKLTVDKSRWQQGNVFSCSVMHEALHNHYTQKSLSLSPGK

SEQ ID NO: 1593 - protein, 986 aa, Artificial Sequence
  Synthetic peptide
EVQLLESGGGLVQPGGSLRLSCAASGFTFSSYAMSWVRQAPGKCLEWVSAISGSGGYTYYADSVKGRFTISRDNSKNTLYLQMNSLRAEDTAVYYCAKHDYSNYPYFDYWGQGTLVTVSSGGGGSGGGGSGGGGSEIVLTQSPGTLSLSPGERATLSCRASQSVRSNYLAWYQQKPGQAPRLLIYGASSRATGIPDRFSGSGSGTDFTLTISRLEPEDFAVYYCQQYGDLPFTFGCGTKVEIKSGGGGSEVQLVESGGGLVQPGGSLKLSCAASGFTFNKYAMNWVRQAPGKGLEWVARIRSKYNNYATYYADSVKDRFTISRDDSKNTAYLQMNNLKTEDTAVYYCVRHGNFGNSYISYWAYWGQGTLVTVSSGGGGSGGGGSGGGGSQTVVTQEPSLTVSPGGTVTLTCGSSTGAVTSGNYPNWVQQKPGQAPRGLIGGTKFLAPGTPARFSGSLLGGKAALTLSGVQPEDEAEYYCVLWYSNRWVFGGGTKLTVLGGGGDKTHTCPPCPAPELLGGPSVFLFPPKPKDTLMISRTPEVTCVVVDVSHEDPEVKFNWYVDGVEVHNAKTKPCEEQYGSTYRCVSVLTVLHQDWLNGKEYKCKVSNKALPAPIEKTISKAKGQPREPQVYTLPPSREEMTKNQVSLTCLVKGFYPSDIAVEWESNGQPENNYKTTPPVLDSDGSFFLYSKLTVDKSRWQQGNVFSCSVMHEALHNHYTQKSLSLSPGKGGGGSGGGGSGGGGSGGGGSGGGGSGGGGSDKTHTCPPCPAPELLGGPSVFLFPPKPKDTLMISRTPEVTCVVVDVSHEDPEVKFNWYVDGVEVHNAKTKPCEEQYGSTYRCVSVLTVLHQDWLNGKEYKCKVSNKALPAPIEKTISKAKGQPREPQVYTLPPSREEMTKNQVSLTCLVKGFYPSDIAVEWESNGQPENNYKTTPPVLDSDGSFFLYSKLTVDKSRWQQGNVFSCSVMHEALHNHYTQKSLSLSPGK

SEQ ID NO: 1594 - protein, 986 aa, Artificial Sequence
  Synthetic peptide
EVQLLESGGGLAQPGGSLRLSCAASGFTFSSYAMSWVRQAPGKGLEWVSAISGSGGSTFYADSVKGRFTISRDNSKNTLYLQMNSLRAEDTAVYFCAKHDYSNYPYFDYWGQGTLVTVSSGGGGSGGGGSGGGGSEIVLTQSPGTLSLSPGERATLSCRASQSVRSSYLAWYQQKPGQAPRLLIYGASSRATGIPDRFSGSGSGTDFTLTISRLEPEDFAVYYCQQYGDLPFTFGPGTKVEIKSGGGGSEVQLVESGGGLVQPGGSLKLSCAASGFTFNKYAMNWVRQAPGKGLEWVARIRSKYNNYATYYADSVKDRFTISRDDSKNTAYLQMNNLKTEDTAVYYCVRHGNFGNSYISYWAYWGQGTLVTVSSGGGGSGGGGSGGGGSQTVVTQEPSLTVSPGGTVTLTCGSSTGAVTSGNYPNWVQQKPGQAPRGLIGGTKFLAPGTPARFSGSLLGGKAALTLSGVQPEDEAEYYCVLWYSNRWVFGGGTKLTVLGGGGDKTHTCPPCPAPELLGGPSVFLFPPKPKDTLMISRTPEVTCVVVDVSHEDPEVKFNWYVDGVEVHNAKTKPCEEQYGSTYRCVSVLTVLHQDWLNGKEYKCKVSNKALPAPIEKTISKAKGQPREPQVYTLPPSREEMTKNQVSLTCLVKGFYPSDIAVEWESNGQPENNYKTTPPVLDSDGSFFLYSKLTVDKSRWQQGNVFSCSVMHEALHNHYTQKSLSLSPGKGGGGSGGGGSGGGGSGGGGSGGGGSGGGGSDKTHTCPPCPAPELLGGPSVFLFPPKPKDTLMISRTPEVTCVVVDVSHEDPEVKFNWYVDGVEVHNAKTKPCEEQYGSTYRCVSVLTVLHQDWLNGKEYKCKVSNKALPAPIEKTISKAKGQPREPQVYTLPPSREEMTKNQVSLTCLVKGFYPSDIAVEWESNGQPENNYKTTPPVLDSDGSFFLYSKLTVDKSRWQQGNVFSCSVMHEALHNHYTQKSLSLSPGK

SEQ ID NO: 1595 - protein, 986 aa, Artificial Sequence
  Synthetic peptide
EVQLLESGGGLAQPGGSLRLSCAASGFTFSSYAMSWVRQAPGKCLEWVSAISGSGGSTFYADSVKGRFTISRDNSKNTLYLQMNSLRAEDTAVYFCAKHDYSNYPYFDYWGQGTLVTVSSGGGGSGGGGSGGGGSEIVLTQSPGTLSLSPGERATLSCRASQSVRSSYLAWYQQKPGQAPRLLIYGASSRATGIPDRFSGSGSGTDFTLTISRLEPEDFAVYYCQQYGDLPFTFGCGTKVEIKSGGGGSEVQLVESGGGLVQPGGSLKLSCAASGFTFNKYAMNWVRQAPGKGLEWVARIRSKYNNYATYYADSVKDRFTISRDDSKNTAYLQMNNLKTEDTAVYYCVRHGNFGNSYISYWAYWGQGTLVTVSSGGGGSGGGGSGGGGSQTVVTQEPSLTVSPGGTVTLTCGSSTGAVTSGNYPNWVQQKPGQAPRGLIGGTKFLAPGTPARFSGSLLGGKAALTLSGVQPEDEAEYYCVLWYSNRWVFGGGTKLTVLGGGGDKTHTCPPCPAPELLGGPSVFLFPPKPKDTLMISRTPEVTCVVVDVSHEDPEVKFNWYVDGVEVHNAKTKPCEEQYGSTYRCVSVLTVLHQDWLNGKEYKCKVSNKALPAPIEKTISKAKGQPREPQVYTLPPSREEMTKNQVSLTCLVKGFYPSDIAVEWESNGQPENNYKTTPPVLDSDGSFFLYSKLTVDKSRWQQGNVFSCSVMHEALHNHYTQKSLSLSPGKGGGGSGGGGSGGGGSGGGGSGGGGSGGGGSDKTHTCPPCPAPELLGGPSVFLFPPKPKDTLMISRTPEVTCVVVDVSHEDPEVKFNWYVDGVEVHNAKTKPCEEQYGSTYRCVSVLTVLHQDWLNGKEYKCKVSNKALPAPIEKTISKAKGQPREPQVYTLPPSREEMTKNQVSLTCLVKGFYPSDIAVEWESNGQPENNYKTTPPVLDSDGSFFLYSKLTVDKSRWQQGNVFSCSVMHEALHNHYTQKSLSLSPGK

SEQ ID NO: 1596 - protein, 986 aa, Artificial Sequence
  Synthetic peptide
EVQLLESGGGMVQPGGSLRLSCAASGFTFSSYAMSWVRQAPGKGLEWVSAISGSGGRTFYADSVEGRFTISRDNSKNTLYLQMNSLRAEDTAVYYCAKHDYSNYPYFDYWGQGTLVTVSSGGGGSGGGGSGGGGSEIVLTQSPGTLSLSPGERATLSCRASQSVRSNYLAWYQQKPGQAPRLLIYGASSRATGIPDRFSGSGSGTDFTLTISRLEPEDFAVYYCQQYGDLPFTFGPGTKVEIKSGGGGSEVQLVESGGGLVQPGGSLKLSCAASGFTFNKYAMNWVRQAPGKGLEWVARIRSKYNNYATYYADSVKDRFTISRDDSKNTAYLQMNNLKTEDTAVYYCVRHGNFGNSYISYWAYWGQGTLVTVSSGGGGSGGGGSGGGGSQTVVTQEPSLTVSPGGTVTLTCGSSTGAVTSGNYPNWVQQKPGQAPRGLIGGTKFLAPGTPARFSGSLLGGKAALTLSGVQPEDEAEYYCVLWYSNRWVFGGGTKLTVLGGGGDKTHTCPPCPAPELLGGPSVFLFPPKPKDTLMISRTPEVTCVVVDVSHEDPEVKFNWYVDGVEVHNAKTKPCEEQYGSTYRCVSVLTVLHQDWLNGKEYKCKVSNKALPAPIEKTISKAKGQPREPQVYTLPPSREEMTKNQVSLTCLVKGFYPSDIAVEWESNGQPENNYKTTPPVLDSDGSFFLYSKLTVDKSRWQQGNVFSCSVMHEALHNHYTQKSLSLSPGKGGGGSGGGGSGGGGSGGGGSGGGGSGGGGSDKTHTCPPCPAPELLGGPSVFLFPPKPKDTLMISRTPEVTCVVVDVSHEDPEVKFNWYVDGVEVHNAKTKPCEEQYGSTYRCVSVLTVLHQDWLNGKEYKCKVSNKALPAPIEKTISKAKGQPREPQVYTLPPSREEMTKNQVSLTCLVKGFYPSDIAVEWESNGQPENNYKTTPPVLDSDGSFFLYSKLTVDKSRWQQGNVFSCSVMHEALHNHYTQKSLSLSPGK

SEQ ID NO: 1597 - protein, 986 aa, Artificial Sequence
  Synthetic peptide
EVQLLESGGGMVQPGGSLRLSCAASGFTFSSYAMSWVRQAPGKCLEWVSAISGSGGRTFYADSVEGRFTISRDNSKNTLYLQMNSLRAEDTAVYYCAKHDYSNYPYFDYWGQGTLVTVSSGGGGSGGGGSGGGGSEIVLTQSPGTLSLSPGERATLSCRASQSVRSNYLAWYQQKPGQAPRLLIYGASSRATGIPDRFSGSGSGTDFTLTISRLEPEDFAVYYCQQYGDLPFTFGCGTKVEIKSGGGGSEVQLVESGGGLVQPGGSLKLSCAASGFTFNKYAMNWVRQAPGKGLEWVARIRSKYNNYATYYADSVKDRFTISRDDSKNTAYLQMNNLKTEDTAVYYCVRHGNFGNSYISYWAYWGQGTLVTVSSGGGGSGGGGSGGGGSQTVVTQEPSLTVSPGGTVTLTCGSSTGAVTSGNYPNWVQQKPGQAPRGLIGGTKFLAPGTPARFSGSLLGGKAALTLSGVQPEDEAEYYCVLWYSNRWVFGGGTKLTVLGGGGDKTHTCPPCPAPELLGGPSVFLFPPKPKDTLMISRTPEVTCVVVDVSHEDPEVKFNWYVDGVEVHNAKTKPCEEQYGSTYRCVSVLTVLHQDWLNGKEYKCKVSNKALPAPIEKTISKAKGQPREPQVYTLPPSREEMTKNQVSLTCLVKGFYPSDIAVEWESNGQPENNYKTTPPVLDSDGSFFLYSKLTVDKSRWQQGNVFSCSVMHEALHNHYTQKSLSLSPGKGGGGSGGGGSGGGGSGGGGSGGGGSGGGGSDKTHTCPPCPAPELLGGPSVFLFPPKPKDTLMISRTPEVTCVVVDVSHEDPEVKFNWYVDGVEVHNAKTKPCEEQYGSTYRCVSVLTVLHQDWLNGKEYKCKVSNKALPAPIEKTISKAKGQPREPQVYTLPPSREEMTKNQVSLTCLVKGFYPSDIAVEWESNGQPENNYKTTPPVLDSDGSFFLYSKLTVDKSRWQQGNVFSCSVMHEALHNHYTQKSLSLSPGK

SEQ ID NO: 1598 - protein, 986 aa, Artificial Sequence
  Synthetic peptide
EVQLLESGGGMVQPGGSLRLSCAASGFTFSSYAMSWVRQAPGKGLEWVSAISGSGGRTFYADSVEGRFTISRDNSKNTLYLQMNSLRAEDTAVYYCAKHDYSNYPYFDYWGQGTLVTVSSGGGGSGGGGSGGGGSEIVLTQSPGTLSLSPGERATLSCRASQSVRSSYLAWYQQKPGQAPRLLIYGASSRATGIPDRFSGSGSGTDFTLTISRLEPEDFAVYYCQQYGSSPFTFGPGTKVEIKSGGGGSEVQLVESGGGLVQPGGSLKLSCAASGFTFNKYAMNWVRQAPGKGLEWVARIRSKYNNYATYYADSVKDRFTISRDDSKNTAYLQMNNLKTEDTAVYYCVRHGNFGNSYISYWAYWGQGTLVTVSSGGGGSGGGGSGGGGSQTVVTQEPSLTVSPGGTVTLTCGSSTGAVTSGNYPNWVQQKPGQAPRGLIGGTKFLAPGTPARFSGSLLGGKAALTLSGVQPEDEAEYYCVLWYSNRWVFGGGTKLTVLGGGGDKTHTCPPCPAPELLGGPSVFLFPPKPKDTLMISRTPEVTCVVVDVSHEDPEVKFNWYVDGVEVHNAKTKPCEEQYGSTYRCVSVLTVLHQDWLNGKEYKCKVSNKALPAPIEKTISKAKGQPREPQVYTLPPSREEMTKNQVSLTCLVKGFYPSDIAVEWESNGQPENNYKTTPPVLDSDGSFFLYSKLTVDKSRWQQGNVFSCSVMHEALHNHYTQKSLSLSPGKGGGGSGGGGSGGGGSGGGGSGGGGSGGGGSDKTHTCPPCPAPELLGGPSVFLFPPKPKDTLMISRTPEVTCVVVDVSHEDPEVKFNWYVDGVEVHNAKTKPCEEQYGSTYRCVSVLTVLHQDWLNGKEYKCKVSNKALPAPIEKTISKAKGQPREPQVYTLPPSREEMTKNQVSLTCLVKGFYPSDIAVEWESNGQPENNYKTTPPVLDSDGSFFLYSKLTVDKSRWQQGNVFSCSVMHEALHNHYTQKSLSLSPGK

SEQ ID NO: 1599 - protein, 986 aa, Artificial Sequence
  Synthetic peptide
EVQLLESGGGMVQPGGSLRLSCAASGFTFSSYAMSWVRQAPGKCLEWVSAISGSGGRTFYADSVEGRFTISRDNSKNTLYLQMNSLRAEDTAVYYCAKHDYSNYPYFDYWGQGTLVTVSSGGGGSGGGGSGGGGSEIVLTQSPGTLSLSPGERATLSCRASQSVRSSYLAWYQQKPGQAPRLLIYGASSRATGIPDRFSGSGSGTDFTLTISRLEPEDFAVYYCQQYGSSPFTFGCGTKVEIKSGGGGSEVQLVESGGGLVQPGGSLKLSCAASGFTFNKYAMNWVRQAPGKGLEWVARIRSKYNNYATYYADSVKDRFTISRDDSKNTAYLQMNNLKTEDTAVYYCVRHGNFGNSYISYWAYWGQGTLVTVSSGGGGSGGGGSGGGGSQTVVTQEPSLTVSPGGTVTLTCGSSTGAVTSGNYPNWVQQKPGQAPRGLIGGTKFLAPGTPARFSGSLLGGKAALTLSGVQPEDEAEYYCVLWYSNRWVFGGGTKLTVLGGGGDKTHTCPPCPAPELLGGPSVFLFPPKPKDTLMISRTPEVTCVVVDVSHEDPEVKFNWYVDGVEVHNAKTKPCEEQYGSTYRCVSVLTVLHQDWLNGKEYKCKVSNKALPAPIEKTISKAKGQPREPQVYTLPPSREEMTKNQVSLTCLVKGFYPSDIAVEWESNGQPENNYKTTPPVLDSDGSFFLYSKLTVDKSRWQQGNVFSCSVMHEALHNHYTQKSLSLSPGKGGGGSGGGGSGGGGSGGGGSGGGGSGGGGSDKTHTCPPCPAPELLGGPSVFLFPPKPKDTLMISRTPEVTCVVVDVSHEDPEVKFNWYVDGVEVHNAKTKPCEEQYGSTYRCVSVLTVLHQDWLNGKEYKCKVSNKALPAPIEKTISKAKGQPREPQVYTLPPSREEMTKNQVSLTCLVKGFYPSDIAVEWESNGQPENNYKTTPPVLDSDGSFFLYSKLTVDKSRWQQGNVFSCSVMHEALHNHYTQKSLSLSPGK

SEQ ID NO: 1600 - protein, 986 aa, Artificial Sequence
  Synthetic peptide
EVQLLESGGGLVQPGGSLRLSCAASGFTFSSYAMSWVRQAPGKGLEWVSAISGSGGSTFYADSVQGRFTISRDNSKNTLYLQVNSLRAEDTAVYYCARHDYSNYPYFDYWGQGTLVTVSSGGGGSGGGGSGGGGSEIVLTQSPGTLSLSPGERATLSCRASQSVRGNYLAWYQQKPGQAPRLLIYGASSRATGIPDRFSGSGSGTDFTLTISRLEPEDFAVYYCQQYGYSPFTFGPGTKVEIKSGGGGSEVQLVESGGGLVQPGGSLKLSCAASGFTFNKYAMNWVRQAPGKGLEWVARIRSKYNNYATYYADSVKDRFTISRDDSKNTAYLQMNNLKTEDTAVYYCVRHGNFGNSYISYWAYWGQGTLVTVSSGGGGSGGGGSGGGGSQTVVTQEPSLTVSPGGTVTLTCGSSTGAVTSGNYPNWVQQKPGQAPRGLIGGTKFLAPGTPARFSGSLLGGKAALTLSGVQPEDEAEYYCVLWYSNRWVFGGGTKLTVLGGGGDKTHTCPPCPAPELLGGPSVFLFPPKPKDTLMISRTPEVTCVVVDVSHEDPEVKFNWYVDGVEVHNAKTKPCEEQYGSTYRCVSVLTVLHQDWLNGKEYKCKVSNKALPAPIEKTISKAKGQPREPQVYTLPPSREEMTKNQVSLTCLVKGFYPSDIAVEWESNGQPENNYKTTPPVLDSDGSFFLYSKLTVDKSRWQQGNVFSCSVMHEALHNHYTQKSLSLSPGKGGGGSGGGGSGGGGSGGGGSGGGGSGGGGSDKTHTCPPCPAPELLGGPSVFLFPPKPKDTLMISRTPEVTCVVVDVSHEDPEVKFNWYVDGVEVHNAKTKPCEEQYGSTYRCVSVLTVLHQDWLNGKEYKCKVSNKALPAPIEKTISKAKGQPREPQVYTLPPSREEMTKNQVSLTCLVKGFYPSDIAVEWESNGQPENNYKTTPPVLDSDGSFFLYSKLTVDKSRWQQGNVFSCSVMHEALHNHYTQKSLSLSPGK

SEQ ID NO: 1601 - protein, 986 aa, Artificial Sequence
  Synthetic peptide
EVQLLESGGGLVQPGGSLRLSCAASGFTFSSYAMSWVRQAPGKCLEWVSAISGSGGSTFYADSVQGRFTISRDNSKNTLYLQVNSLRAEDTAVYYCARHDYSNYPYFDYWGQGTLVTVSSGGGGSGGGGSGGGGSEIVLTQSPGTLSLSPGERATLSCRASQSVRGNYLAWYQQKPGQAPRLLIYGASSRATGIPDRFSGSGSGTDFTLTISRLEPEDFAVYYCQQYGYSPFTFGCGTKVEIKSGGGGSEVQLVESGGGLVQPGGSLKLSCAASGFTFNKYAMNWVRQAPGKGLEWVARIRSKYNNYATYYADSVKDRFTISRDDSKNTAYLQMNNLKTEDTAVYYCVRHGNFGNSYISYWAYWGQGTLVTVSSGGGGSGGGGSGGGGSQTVVTQEPSLTVSPGGTVTLTCGSSTGAVTSGNYPNWVQQKPGQAPRGLIGGTKFLAPGTPARFSGSLLGGKAALTLSGVQPEDEAEYYCVLWYSNRWVFGGGTKLTVLGGGGDKTHTCPPCPAPELLGGPSVFLFPPKPKDTLMISRTPEVTCVVVDVSHEDPEVKFNWYVDGVEVHNAKTKPCEEQYGSTYRCVSVLTVLHQDWLNGKEYKCKVSNKALPAPIEKTISKAKGQPREPQVYTLPPSREEMTKNQVSLTCLVKGFYPSDIAVEWESNGQPENNYKTTPPVLDSDGSFFLYSKLTVDKSRWQQGNVFSCSVMHEALHNHYTQKSLSLSPGKGGGGSGGGGSGGGGSGGGGSGGGGSGGGGSDKTHTCPPCPAPELLGGPSVFLFPPKPKDTLMISRTPEVTCVVVDVSHEDPEVKFNWYVDGVEVHNAKTKPCEEQYGSTYRCVSVLTVLHQDWLNGKEYKCKVSNKALPAPIEKTISKAKGQPREPQVYTLPPSREEMTKNQVSLTCLVKGFYPSDIAVEWESNGQPENNYKTTPPVLDSDGSFFLYSKLTVDKSRWQQGNVFSCSVMHEALHNHYTQKSLSLSPGK

SEQ ID NO: 1602 - protein, 986 aa, Artificial Sequence
  Synthetic peptide
EVQLLESGGGLVQPGGSLRLSCAASGFTFSTYAMSWVRQAPGKGLEWVSAISGSGGGTFYADSVKGRFTISRDNSKNTLYLQMNSLRAEDTAVYYCAKHDYSNYPYFDYWGQGTLVTVSSGGGGSGGGGSGGGGSEIVLTQSPGTLSLSPGERATLSCRASQSIRSNYLAWYQQKPGQAPRLLIYGASSRATGIPDRFSGSGSGTDFTLTISRLEPEDFAVYYCQQYGSSPFTFGPGTKVEIKSGGGGSEVQLVESGGGLVQPGGSLKLSCAASGFTFNKYAMNWVRQAPGKGLEWVARIRSKYNNYATYYADSVKDRFTISRDDSKNTAYLQMNNLKTEDTAVYYCVRHGNFGNSYISYWAYWGQGTLVTVSSGGGGSGGGGSGGGGSQTVVTQEPSLTVSPGGTVTLTCGSSTGAVTSGNYPNWVQQKPGQAPRGLIGGTKFLAPGTPARFSGSLLGGKAALTLSGVQPEDEAEYYCVLWYSNRWVFGGGTKLTVLGGGGDKTHTCPPCPAPELLGGPSVFLFPPKPKDTLMISRTPEVTCVVVDVSHEDPEVKFNWYVDGVEVHNAKTKPCEEQYGSTYRCVSVLTVLHQDWLNGKEYKCKVSNKALPAPIEKTISKAKGQPREPQVYTLPPSREEMTKNQVSLTCLVKGFYPSDIAVEWESNGQPENNYKTTPPVLDSDGSFFLYSKLTVDKSRWQQGNVFSCSVMHEALHNHYTQKSLSLSPGKGGGGSGGGGSGGGGSGGGGSGGGGSGGGGSDKTHTCPPCPAPELLGGPSVFLFPPKPKDTLMISRTPEVTCVVVDVSHEDPEVKFNWYVDGVEVHNAKTKPCEEQYGSTYRCVSVLTVLHQDWLNGKEYKCKVSNKALPAPIEKTISKAKGQPREPQVYTLPPSREEMTKNQVSLTCLVKGFYPSDIAVEWESNGQPENNYKTTPPVLDSDGSFFLYSKLTVDKSRWQQGNVFSCSVMHEALHNHYTQKSLSLSPGK

SEQ ID NO: 1603 - protein, 986 aa, Artificial Sequence
  Synthetic peptide
EVQLLESGGGLVQPGGSLRLSCAASGFTFSTYAMSWVRQAPGKCLEWVSAISGSGGGTFYADSVKGRFTISRDNSKNTLYLQMNSLRAEDTAVYYCAKHDYSNYPYFDYWGQGTLVTVSSGGGGSGGGGSGGGGSEIVLTQSPGTLSLSPGERATLSCRASQSIRSNYLAWYQQKPGQAPRLLIYGASSRATGIPDRFSGSGSGTDFTLTISRLEPEDFAVYYCQQYGSSPFTFGCGTKVEIKSGGGGSEVQLVESGGGLVQPGGSLKLSCAASGFTFNKYAMNWVRQAPGKGLEWVARIRSKYNNYATYYADSVKDRFTISRDDSKNTAYLQMNNLKTEDTAVYYCVRHGNFGNSYISYWAYWGQGTLVTVSSGGGGSGGGGSGGGGSQTVVTQEPSLTVSPGGTVTLTCGSSTGAVTSGNYPNWVQQKPGQAPRGLIGGTKFLAPGTPARFSGSLLGGKAALTLSGVQPEDEAEYYCVLWYSNRWVFGGGTKLTVLGGGGDKTHTCPPCPAPELLGGPSVFLFPPKPKDTLMISRTPEVTCVVVDVSHEDPEVKFNWYVDGVEVHNAKTKPCEEQYGSTYRCVSVLTVLHQDWLNGKEYKCKVSNKALPAPIEKTISKAKGQPREPQVYTLPPSREEMTKNQVSLTCLVKGFYPSDIAVEWESNGQPENNYKTTPPVLDSDGSFFLYSKLTVDKSRWQQGNVFSCSVMHEALHNHYTQKSLSLSPGKGGGGSGGGGSGGGGSGGGGSGGGGSGGGGSDKTHTCPPCPAPELLGGPSVFLFPPKPKDTLMISRTPEVTCVVVDVSHEDPEVKFNWYVDGVEVHNAKTKPCEEQYGSTYRCVSVLTVLHQDWLNGKEYKCKVSNKALPAPIEKTISKAKGQPREPQVYTLPPSREEMTKNQVSLTCLVKGFYPSDIAVEWESNGQPENNYKTTPPVLDSDGSFFLYSKLTVDKSRWQQGNVFSCSVMHEALHNHYTQKSLSLSPGK

SEQ ID NO: 1604 - protein, 986 aa, Artificial Sequence
  Synthetic peptide
EVQLLESGGGLVQPGGSLRLSCAASGFTFSTYAMSWVRQAPGKGLEWVSLISGSGGRTYYADSVKGRFTISRDNSKNTLYLQMNSLRAEDTAVYYCAKHDYSNYPYFDYWGQGTLVTVSSGGGGSGGGGSGGGGSEIVLTQSPGTLSLSPGERATLSCRASQSVRSNYLAWYQQKPGQAPRLLIYGASNRATGIPDRFSGSGSGTDFTLTISRLEPEDFAVYSCQQYGISPPTFGGGTKVEIKSGGGGSEVQLVESGGGLVQPGGSLKLSCAASGFTFNKYAMNWVRQAPGKGLEWVARIRSKYNNYATYYADSVKDRFTISRDDSKNTAYLQMNNLKTEDTAVYYCVRHGNFGNSYISYWAYWGQGTLVTVSSGGGGSGGGGSGGGGSQTVVTQEPSLTVSPGGTVTLTCGSSTGAVTSGNYPNWVQQKPGQAPRGLIGGTKFLAPGTPARFSGSLLGGKAALTLSGVQPEDEAEYYCVLWYSNRWVFGGGTKLTVLGGGGDKTHTCPPCPAPELLGGPSVFLFPPKPKDTLMISRTPEVTCVVVDVSHEDPEVKFNWYVDGVEVHNAKTKPCEEQYGSTYRCVSVLTVLHQDWLNGKEYKCKVSNKALPAPIEKTISKAKGQPREPQVYTLPPSREEMTKNQVSLTCLVKGFYPSDIAVEWESNGQPENNYKTTPPVLDSDGSFFLYSKLTVDKSRWQQGNVFSCSVMHEALHNHYTQKSLSLSPGKGGGGSGGGGSGGGGSGGGGSGGGGSGGGGSDKTHTCPPCPAPELLGGPSVFLFPPKPKDTLMISRTPEVTCVVVDVSHEDPEVKFNWYVDGVEVHNAKTKPCEEQYGSTYRCVSVLTVLHQDWLNGKEYKCKVSNKALPAPIEKTISKAKGQPREPQVYTLPPSREEMTKNQVSLTCLVKGFYPSDIAVEWESNGQPENNYKTTPPVLDSDGSFFLYSKLTVDKSRWQQGNVFSCSVMHEALHNHYTQKSLSLSPGK

SEQ ID NO: 1605 - protein, 986 aa, Artificial Sequence
  Synthetic peptide
EVQLLESGGGLVQPGGSLRLSCAASGFTFSTYAMSWVRQAPGKCLEWVSLISGSGGRTYYADSVKGRFTISRDNSKNTLYLQMNSLRAEDTAVYYCAKHDYSNYPYFDYWGQGTLVTVSSGGGGSGGGGSGGGGSEIVLTQSPGTLSLSPGERATLSCRASQSVRSNYLAWYQQKPGQAPRLLIYGASNRATGIPDRFSGSGSGTDFTLTISRLEPEDFAVYSCQQYGISPPTFGCGTKVEIKSGGGGSEVQLVESGGGLVQPGGSLKLSCAASGFTFNKYAMNWVRQAPGKGLEWVARIRSKYNNYATYYADSVKDRFTISRDDSKNTAYLQMNNLKTEDTAVYYCVRHGNFGNSYISYWAYWGQGTLVTVSSGGGGSGGGGSGGGGSQTVVTQEPSLTVSPGGTVTLTCGSSTGAVTSGNYPNWVQQKPGQAPRGLIGGTKFLAPGTPARFSGSLLGGKAALTLSGVQPEDEAEYYCVLWYSNRWVFGGGTKLTVLGGGGDKTHTCPPCPAPELLGGPSVFLFPPKPKDTLMISRTPEVTCVVVDVSHEDPEVKFNWYVDGVEVHNAKTKPCEEQYGSTYRCVSVLTVLHQDWLNGKEYKCKVSNKALPAPIEKTISKAKGQPREPQVYTLPPSREEMTKNQVSLTCLVKGFYPSDIAVEWESNGQPENNYKTTPPVLDSDGSFFLYSKLTVDKSRWQQGNVFSCSVMHEALHNHYTQKSLSLSPGKGGGGSGGGGSGGGGSGGGGSGGGGSGGGGSDKTHTCPPCPAPELLGGPSVFLFPPKPKDTLMISRTPEVTCVVVDVSHEDPEVKFNWYVDGVEVHNAKTKPCEEQYGSTYRCVSVLTVLHQDWLNGKEYKCKVSNKALPAPIEKTISKAKGQPREPQVYTLPPSREEMTKNQVSLTCLVKGFYPSDIAVEWESNGQPENNYKTTPPVLDSDGSFFLYSKLTVDKSRWQQGNVFSCSVMHEALHNHYTQKSLSLSPGK

SEQ ID NO: 1606 - protein, 985 aa, Artificial Sequence
  Synthetic peptide
EVQLLESGGGLVQPGGSLRLSCAASGFTFSSYAMSWVRQSPGKGLEWVSAISGSGGRAQYADSVQGRFTVSRDNSKNTLYLQMNSLRAEDTAVYYCAKHDYSNYPYFDYWGQGTLVTVSSGGGGSGGGGSGGGGSEIVLTQSPATLSVSPGERATLSCRASQSVSSNLAWYQQKPGQAPRLLIYGSSSRATGIPDRFSGSGSGTDFTLTISRLEPEDFAVYYCQQYGSSPPPFGGGTKVEIKSGGGGSEVQLVESGGGLVQPGGSLKLSCAASGFTFNKYAMNWVRQAPGKGLEWVARIRSKYNNYATYYADSVKDRFTISRDDSKNTAYLQMNNLKTEDTAVYYCVRHGNFGNSYISYWAYWGQGTLVTVSSGGGGSGGGGSGGGGSQTVVTQEPSLTVSPGGTVTLTCGSSTGAVTSGNYPNWVQQKPGQAPRGLIGGTKFLAPGTPARFSGSLLGGKAALTLSGVQPEDEAEYYCVLWYSNRWVFGGGTKLTVLGGGGDKTHTCPPCPAPELLGGPSVFLFPPKPKDTLMISRTPEVTCVVVDVSHEDPEVKFNWYVDGVEVHNAKTKPCEEQYGSTYRCVSVLTVLHQDWLNGKEYKCKVSNKALPAPIEKTISKAKGQPREPQVYTLPPSREEMTKNQVSLTCLVKGFYPSDIAVEWESNGQPENNYKTTPPVLDSDGSFFLYSKLTVDKSRWQQGNVFSCSVMHEALHNHYTQKSLSLSPGKGGGGSGGGGSGGGGSGGGGSGGGGSGGGGSDKTHTCPPCPAPELLGGPSVFLFPPKPKDTLMISRTPEVTCVVVDVSHEDPEVKFNWYVDGVEVHNAKTKPCEEQYGSTYRCVSVLTVLHQDWLNGKEYKCKVSNKALPAPIEKTISKAKGQPREPQVYTLPPSREEMTKNQVSLTCLVKGFYPSDIAVEWESNGQPENNYKTTPPVLDSDGSFFLYSKLTVDKSRWQQGNVFSCSVMHEALHNHYTQKSLSLSPGK

SEQ ID NO: 1607 - protein, 985 aa, Artificial Sequence
  Synthetic peptide
EVQLLESGGGLVQPGGSLRLSCAASGFTFSSYAMSWVRQSPGKCLEWVSAISGSGGRAQYADSVQGRFTVSRDNSKNTLYLQMNSLRAEDTAVYYCAKHDYSNYPYFDYWGQGTLVTVSSGGGGSGGGGSGGGGSEIVLTQSPATLSVSPGERATLSCRASQSVSSNLAWYQQKPGQAPRLLIYGSSSRATGIPDRFSGSGSGTDFTLTISRLEPEDFAVYYCQQYGSSPPPFGCGTKVEIKSGGGGSEVQLVESGGGLVQPGGSLKLSCAASGFTFNKYAMNWVRQAPGKGLEWVARIRSKYNNYATYYADSVKDRFTISRDDSKNTAYLQMNNLKTEDTAVYYCVRHGNFGNSYISYWAYWGQGTLVTVSSGGGGSGGGGSGGGGSQTVVTQEPSLTVSPGGTVTLTCGSSTGAVTSGNYPNWVQQKPGQAPRGLIGGTKFLAPGTPARFSGSLLGGKAALTLSGVQPEDEAEYYCVLWYSNRWVFGGGTKLTVLGGGGDKTHTCPPCPAPELLGGPSVFLFPPKPKDTLMISRTPEVTCVVVDVSHEDPEVKFNWYVDGVEVHNAKTKPCEEQYGSTYRCVSVLTVLHQDWLNGKEYKCKVSNKALPAPIEKTISKAKGQPREPQVYTLPPSREEMTKNQVSLTCLVKGFYPSDIAVEWESNGQPENNYKTTPPVLDSDGSFFLYSKLTVDKSRWQQGNVFSCSVMHEALHNHYTQKSLSLSPGKGGGGSGGGGSGGGGSGGGGSGGGGSGGGGSDKTHTCPPCPAPELLGGPSVFLFPPKPKDTLMISRTPEVTCVVVDVSHEDPEVKFNWYVDGVEVHNAKTKPCEEQYGSTYRCVSVLTVLHQDWLNGKEYKCKVSNKALPAPIEKTISKAKGQPREPQVYTLPPSREEMTKNQVSLTCLVKGFYPSDIAVEWESNGQPENNYKTTPPVLDSDGSFFLYSKLTVDKSRWQQGNVFSCSVMHEALHNHYTQKSLSLSPGK

SEQ ID NO: 1608 - protein, 986 aa, Artificial Sequence
  Synthetic peptide
EVQLLESGGGMVQPGGSLRLSCAASGFTFSSYAMSWVRQAPGKGLEWVSAISGSGGRTFYADSVEGRFTISRDNSKNTLYLQMNSLRAEDTAVYYCTKHDYSNYPYFDYWGQGTLVTVSSGGGGSGGGGSGGGGSEIVLTQSPGTLSLSPGERATLSCRASQGVRSDYLAWYQQKPGQAPRLLIYGASSRATGIPDRFSGSGSGTDFTLTISRLEPEDFAVYHCQQYGSTPPTFGGGTKVEIKSGGGGSEVQLVESGGGLVQPGGSLKLSCAASGFTFNKYAMNWVRQAPGKGLEWVARIRSKYNNYATYYADSVKDRFTISRDDSKNTAYLQMNNLKTEDTAVYYCVRHGNFGNSYISYWAYWGQGTLVTVSSGGGGSGGGGSGGGGSQTVVTQEPSLTVSPGGTVTLTCGSSTGAVTSGNYPNWVQQKPGQAPRGLIGGTKFLAPGTPARFSGSLLGGKAALTLSGVQPEDEAEYYCVLWYSNRWVFGGGTKLTVLGGGGDKTHTCPPCPAPELLGGPSVFLFPPKPKDTLMISRTPEVTCVVVDVSHEDPEVKFNWYVDGVEVHNAKTKPCEEQYGSTYRCVSVLTVLHQDWLNGKEYKCKVSNKALPAPIEKTISKAKGQPREPQVYTLPPSREEMTKNQVSLTCLVKGFYPSDIAVEWESNGQPENNYKTTPPVLDSDGSFFLYSKLTVDKSRWQQGNVFSCSVMHEALHNHYTQKSLSLSPGKGGGGSGGGGSGGGGSGGGGSGGGGSGGGGSDKTHTCPPCPAPELLGGPSVFLFPPKPKDTLMISRTPEVTCVVVDVSHEDPEVKFNWYVDGVEVHNAKTKPCEEQYGSTYRCVSVLTVLHQDWLNGKEYKCKVSNKALPAPIEKTISKAKGQPREPQVYTLPPSREEMTKNQVSLTCLVKGFYPSDIAVEWESNGQPENNYKTTPPVLDSDGSFFLYSKLTVDKSRWQQGNVFSCSVMHEALHNHYTQKSLSLSPGK

SEQ ID NO: 1609 - protein, 986 aa, Artificial Sequence
  Synthetic peptide
EVQLLESGGGMVQPGGSLRLSCAASGFTFSSYAMSWVRQAPGKCLEWVSAISGSGGRTFYADSVEGRFTISRDNSKNTLYLQMNSLRAEDTAVYYCTKHDYSNYPYFDYWGQGTLVTVSSGGGGSGGGGSGGGGSEIVLTQSPGTLSLSPGERATLSCRASQGVRSDYLAWYQQKPGQAPRLLIYGASSRATGIPDRFSGSGSGTDFTLTISRLEPEDFAVYHCQQYGSTPPTFGCGTKVEIKSGGGGSEVQLVESGGGLVQPGGSLKLSCAASGFTFNKYAMNWVRQAPGKGLEWVARIRSKYNNYATYYADSVKDRFTISRDDSKNTAYLQMNNLKTEDTAVYYCVRHGNFGNSYISYWAYWGQGTLVTVSSGGGGSGGGGSGGGGSQTVVTQEPSLTVSPGGTVTLTCGSSTGAVTSGNYPNWVQQKPGQAPRGLIGGTKFLAPGTPARFSGSLLGGKAALTLSGVQPEDEAEYYCVLWYSNRWVFGGGTKLTVLGGGGDKTHTCPPCPAPELLGGPSVFLFPPKPKDTLMISRTPEVTCVVVDVSHEDPEVKFNWYVDGVEVHNAKTKPCEEQYGSTYRCVSVLTVLHQDWLNGKEYKCKVSNKALPAPIEKTISKAKGQPREPQVYTLPPSREEMTKNQVSLTCLVKGFYPSDIAVEWESNGQPENNYKTTPPVLDSDGSFFLYSKLTVDKSRWQQGNVFSCSVMHEALHNHYTQKSLSLSPGKGGGGSGGGGSGGGGSGGGGSGGGGSGGGGSDKTHTCPPCPAPELLGGPSVFLFPPKPKDTLMISRTPEVTCVVVDVSHEDPEVKFNWYVDGVEVHNAKTKPCEEQYGSTYRCVSVLTVLHQDWLNGKEYKCKVSNKALPAPIEKTISKAKGQPREPQVYTLPPSREEMTKNQVSLTCLVKGFYPSDIAVEWESNGQPENNYKTTPPVLDSDGSFFLYSKLTVDKSRWQQGNVFSCSVMHEALHNHYTQKSLSLSPGK

SEQ ID NO: 1610 - protein, 986 aa, Artificial Sequence
  Synthetic peptide
EVQLLESGGGLVQPGGSLRLSCAASGFTFSSYAMSWVRQAPGKGLEWVSAIGDGGGYTYYADSVKGRFTISRDNSKNTLSLLMNSLRAEDTAVYYCARHDYSNYPYFDYWGQGTLVTVSSGGGGSGGGGSGGGGSEIVLTQSPGTLSLSPGERATLSCRASQGVRSSYFAWYQQKPGQAPRLLIYGASTRATGIPARFSGSGSGTDFTLTISRLEPEDFAVYYCQQYGSSPPTFGQGTKVEIKSGGGGSEVQLVESGGGLVQPGGSLKLSCAASGFTFNKYAMNWVRQAPGKGLEWVARIRSKYNNYATYYADSVKDRFTISRDDSKNTAYLQMNNLKTEDTAVYYCVRHGNFGNSYISYWAYWGQGTLVTVSSGGGGSGGGGSGGGGSQTVVTQEPSLTVSPGGTVTLTCGSSTGAVTSGNYPNWVQQKPGQAPRGLIGGTKFLAPGTPARFSGSLLGGKAALTLSGVQPEDEAEYYCVLWYSNRWVFGGGTKLTVLGGGGDKTHTCPPCPAPELLGGPSVFLFPPKPKDTLMISRTPEVTCVVVDVSHEDPEVKFNWYVDGVEVHNAKTKPCEEQYGSTYRCVSVLTVLHQDWLNGKEYKCKVSNKALPAPIEKTISKAKGQPREPQVYTLPPSREEMTKNQVSLTCLVKGFYPSDIAVEWESNGQPENNYKTTPPVLDSDGSFFLYSKLTVDKSRWQQGNVFSCSVMHEALHNHYTQKSLSLSPGKGGGGSGGGGSGGGGSGGGGSGGGGSGGGGSDKTHTCPPCPAPELLGGPSVFLFPPKPKDTLMISRTPEVTCVVVDVSHEDPEVKFNWYVDGVEVHNAKTKPCEEQYGSTYRCVSVLTVLHQDWLNGKEYKCKVSNKALPAPIEKTISKAKGQPREPQVYTLPPSREEMTKNQVSLTCLVKGFYPSDIAVEWESNGQPENNYKTTPPVLDSDGSFFLYSKLTVDKSRWQQGNVFSCSVMHEALHNHYTQKSLSLSPGK

SEQ ID NO: 1611 - protein, 986 aa, Artificial Sequence
  Synthetic peptide
EVQLLESGGGLVQPGGSLRLSCAASGFTFSSYAMSWVRQAPGKCLEWVSAIGDGGGYTYYADSVKGRFTISRDNSKNTLSLLMNSLRAEDTAVYYCARHDYSNYPYFDYWGQGTLVTVSSGGGGSGGGGSGGGGSEIVLTQSPGTLSLSPGERATLSCRASQGVRSSYFAWYQQKPGQAPRLLIYGASTRATGIPARFSGSGSGTDFTLTISRLEPEDFAVYYCQQYGSSPPTFGCGTKVEIKSGGGGSEVQLVESGGGLVQPGGSLKLSCAASGFTFNKYAMNWVRQAPGKGLEWVARIRSKYNNYATYYADSVKDRFTISRDDSKNTAYLQMNNLKTEDTAVYYCVRHGNFGNSYISYWAYWGQGTLVTVSSGGGGSGGGGSGGGGSQTVVTQEPSLTVSPGGTVTLTCGSSTGAVTSGNYPNWVQQKPGQAPRGLIGGTKFLAPGTPARFSGSLLGGKAALTLSGVQPEDEAEYYCVLWYSNRWVFGGGTKLTVLGGGGDKTHTCPPCPAPELLGGPSVFLFPPKPKDTLMISRTPEVTCVVVDVSHEDPEVKFNWYVDGVEVHNAKTKPCEEQYGSTYRCVSVLTVLHQDWLNGKEYKCKVSNKALPAPIEKTISKAKGQPREPQVYTLPPSREEMTKNQVSLTCLVKGFYPSDIAVEWESNGQPENNYKTTPPVLDSDGSFFLYSKLTVDKSRWQQGNVFSCSVMHEALHNHYTQKSLSLSPGKGGGGSGGGGSGGGGSGGGGSGGGGSGGGGSDKTHTCPPCPAPELLGGPSVFLFPPKPKDTLMISRTPEVTCVVVDVSHEDPEVKFNWYVDGVEVHNAKTKPCEEQYGSTYRCVSVLTVLHQDWLNGKEYKCKVSNKALPAPIEKTISKAKGQPREPQVYTLPPSREEMTKNQVSLTCLVKGFYPSDIAVEWESNGQPENNYKTTPPVLDSDGSFFLYSKLTVDKSRWQQGNVFSCSVMHEALHNHYTQKSLSLSPGK

SEQ ID NO: 1612 - protein, 986 aa, Artificial Sequence
  Synthetic peptide
EVQLLESGGGVVQPGRSLRLSCAASGFTFSSYAMSWVRQAPGKGLEWVSAISGSGGRTFYADSVEGRFTISRDNSKNTLYLQMNSLRAEDTAVYYCAKHDYSNYPYFDYWGQGTLVTVSSGGGGSGGGGSGGGGSEIVLTQSPGTLSLSPGERATLSCRASQSIRSNYLAWYQQKPGQAPRLLIYGASSRATGIPDRFSGSGSGTDFTLTISRLEPEDFAVYYCQQYGSSPPSFGQGTKVEIKSGGGGSEVQLVESGGGLVQPGGSLKLSCAASGFTFNKYAMNWVRQAPGKGLEWVARIRSKYNNYATYYADSVKDRFTISRDDSKNTAYLQMNNLKTEDTAVYYCVRHGNFGNSYISYWAYWGQGTLVTVSSGGGGSGGGGSGGGGSQTVVTQEPSLTVSPGGTVTLTCGSSTGAVTSGNYPNWVQQKPGQAPRGLIGGTKFLAPGTPARFSGSLLGGKAALTLSGVQPEDEAEYYCVLWYSNRWVFGGGTKLTVLGGGGDKTHTCPPCPAPELLGGPSVFLFPPKPKDTLMISRTPEVTCVVVDVSHEDPEVKFNWYVDGVEVHNAKTKPCEEQYGSTYRCVSVLTVLHQDWLNGKEYKCKVSNKALPAPIEKTISKAKGQPREPQVYTLPPSREEMTKNQVSLTCLVKGFYPSDIAVEWESNGQPENNYKTTPPVLDSDGSFFLYSKLTVDKSRWQQGNVFSCSVMHEALHNHYTQKSLSLSPGKGGGGSGGGGSGGGGSGGGGSGGGGSGGGGSDKTHTCPPCPAPELLGGPSVFLFPPKPKDTLMISRTPEVTCVVVDVSHEDPEVKFNWYVDGVEVHNAKTKPCEEQYGSTYRCVSVLTVLHQDWLNGKEYKCKVSNKALPAPIEKTISKAKGQPREPQVYTLPPSREEMTKNQVSLTCLVKGFYPSDIAVEWESNGQPENNYKTTPPVLDSDGSFFLYSKLTVDKSRWQQGNVFSCSVMHEALHNHYTQKSLSLSPGK

SEQ ID NO: 1613 - protein, 986 aa, Artificial Sequence
  Synthetic peptide
EVQLLESGGGVVQPGRSLRLSCAASGFTFSSYAMSWVRQAPGKCLEWVSAISGSGGRTFYADSVEGRFTISRDNSKNTLYLQMNSLRAEDTAVYYCAKHDYSNYPYFDYWGQGTLVTVSSGGGGSGGGGSGGGGSEIVLTQSPGTLSLSPGERATLSCRASQSIRSNYLAWYQQKPGQAPRLLIYGASSRATGIPDRFSGSGSGTDFTLTISRLEPEDFAVYYCQQYGSSPPSFGCGTKVEIKSGGGGSEVQLVESGGGLVQPGGSLKLSCAASGFTFNKYAMNWVRQAPGKGLEWVARIRSKYNNYATYYADSVKDRFTISRDDSKNTAYLQMNNLKTEDTAVYYCVRHGNFGNSYISYWAYWGQGTLVTVSSGGGGSGGGGSGGGGSQTVVTQEPSLTVSPGGTVTLTCGSSTGAVTSGNYPNWVQQKPGQAPRGLIGGTKFLAPGTPARFSGSLLGGKAALTLSGVQPEDEAEYYCVLWYSNRWVFGGGTKLTVLGGGGDKTHTCPPCPAPELLGGPSVFLFPPKPKDTLMISRTPEVTCVVVDVSHEDPEVKFNWYVDGVEVHNAKTKPCEEQYGSTYRCVSVLTVLHQDWLNGKEYKCKVSNKALPAPIEKTISKAKGQPREPQVYTLPPSREEMTKNQVSLTCLVKGFYPSDIAVEWESNGQPENNYKTTPPVLDSDGSFFLYSKLTVDKSRWQQGNVFSCSVMHEALHNHYTQKSLSLSPGKGGGGSGGGGSGGGGSGGGGSGGGGSGGGGSDKTHTCPPCPAPELLGGPSVFLFPPKPKDTLMISRTPEVTCVVVDVSHEDPEVKFNWYVDGVEVHNAKTKPCEEQYGSTYRCVSVLTVLHQDWLNGKEYKCKVSNKALPAPIEKTISKAKGQPREPQVYTLPPSREEMTKNQVSLTCLVKGFYPSDIAVEWESNGQPENNYKTTPPVLDSDGSFFLYSKLTVDKSRWQQGNVFSCSVMHEALHNHYTQKSLSLSPGK

SEQ ID NO: 1614 - protein, 986 aa, Artificial Sequence
  Synthetic peptide
EVQLLESGGGVVQPGRSLRLSCAASGFTFSSYAMSWVRQAPGKGLEWVSAISGSGGGTFYADSVEGRFTISRDNSKNTLYLQMNSLRAEDTAVYYCARHDYSNYPYFDYWGLGTLVTVSSGGGGSGGGGSGGGGSEIVLTQSPGTLSLSPGERATLSCRASQSVRSSYLAWYQQKPGQAPRLLIYGASSRATGIPDRFSGSGSGTDFTLTISRLEPEDFAVYSCQQYGDLPFTFGPGTKVEIKSGGGGSEVQLVESGGGLVQPGGSLKLSCAASGFTFNKYAMNWVRQAPGKGLEWVARIRSKYNNYATYYADSVKDRFTISRDDSKNTAYLQMNNLKTEDTAVYYCVRHGNFGNSYISYWAYWGQGTLVTVSSGGGGSGGGGSGGGGSQTVVTQEPSLTVSPGGTVTLTCGSSTGAVTSGNYPNWVQQKPGQAPRGLIGGTKFLAPGTPARFSGSLLGGKAALTLSGVQPEDEAEYYCVLWYSNRWVFGGGTKLTVLGGGGDKTHTCPPCPAPELLGGPSVFLFPPKPKDTLMISRTPEVTCVVVDVSHEDPEVKFNWYVDGVEVHNAKTKPCEEQYGSTYRCVSVLTVLHQDWLNGKEYKCKVSNKALPAPIEKTISKAKGQPREPQVYTLPPSREEMTKNQVSLTCLVKGFYPSDIAVEWESNGQPENNYKTTPPVLDSDGSFFLYSKLTVDKSRWQQGNVFSCSVMHEALHNHYTQKSLSLSPGKGGGGSGGGGSGGGGSGGGGSGGGGSGGGGSDKTHTCPPCPAPELLGGPSVFLFPPKPKDTLMISRTPEVTCVVVDVSHEDPEVKFNWYVDGVEVHNAKTKPCEEQYGSTYRCVSVLTVLHQDWLNGKEYKCKVSNKALPAPIEKTISKAKGQPREPQVYTLPPSREEMTKNQVSLTCLVKGFYPSDIAVEWESNGQPENNYKTTPPVLDSDGSFFLYSKLTVDKSRWQQGNVFSCSVMHEALHNHYTQKSLSLSPGK

SEQ ID NO: 1615 - protein, 986 aa, Artificial Sequence
  Synthetic peptide
EVQLLESGGGVVQPGRSLRLSCAASGFTFSSYAMSWVRQAPGKCLEWVSAISGSGGGTFYADSVEGRFTISRDNSKNTLYLQMNSLRAEDTAVYYCARHDYSNYPYFDYWGLGTLVTVSSGGGGSGGGGSGGGGSEIVLTQSPGTLSLSPGERATLSCRASQSVRSSYLAWYQQKPGQAPRLLIYGASSRATGIPDRFSGSGSGTDFTLTISRLEPEDFAVYSCQQYGDLPFTFGCGTKVEIKSGGGGSEVQLVESGGGLVQPGGSLKLSCAASGFTFNKYAMNWVRQAPGKGLEWVARIRSKYNNYATYYADSVKDRFTISRDDSKNTAYLQMNNLKTEDTAVYYCVRHGNFGNSYISYWAYWGQGTLVTVSSGGGGSGGGGSGGGGSQTVVTQEPSLTVSPGGTVTLTCGSSTGAVTSGNYPNWVQQKPGQAPRGLIGGTKFLAPGTPARFSGSLLGGKAALTLSGVQPEDEAEYYCVLWYSNRWVFGGGTKLTVLGGGGDKTHTCPPCPAPELLGGPSVFLFPPKPKDTLMISRTPEVTCVVVDVSHEDPEVKFNWYVDGVEVHNAKTKPCEEQYGSTYRCVSVLTVLHQDWLNGKEYKCKVSNKALPAPIEKTISKAKGQPREPQVYTLPPSREEMTKNQVSLTCLVKGFYPSDIAVEWESNGQPENNYKTTPPVLDSDGSFFLYSKLTVDKSRWQQGNVFSCSVMHEALHNHYTQKSLSLSPGKGGGGSGGGGSGGGGSGGGGSGGGGSGGGGSDKTHTCPPCPAPELLGGPSVFLFPPKPKDTLMISRTPEVTCVVVDVSHEDPEVKFNWYVDGVEVHNAKTKPCEEQYGSTYRCVSVLTVLHQDWLNGKEYKCKVSNKALPAPIEKTISKAKGQPREPQVYTLPPSREEMTKNQVSLTCLVKGFYPSDIAVEWESNGQPENNYKTTPPVLDSDGSFFLYSKLTVDKSRWQQGNVFSCSVMHEALHNHYTQKSLSLSPGK

SEQ ID NO: 1616 - protein, 986 aa, Artificial Sequence
  Synthetic peptide
EVQLLESGGGMVQPGGSLRLSCAASGFTFSSYAMSWVRQAPGKGLEWVSAISGSGGRTFYADSVEGRFTISRDNSKNTLYLQMNSLRAEDTAVYYCTKHDYSNYPYFDYWGQGTLVTVSSGGGGSGGGGSGGGGSEIVLTQSPGTLSLSPGERATLSCRASQSVRSSYLAWYQQKPGQAPRLLIYGASSRATGIPDRFSGSGSGTDFTLTISRLEPEDFAVYYCQQYGDLPFTFGPGTKVDIKSGGGGSEVQLVESGGGLVQPGGSLKLSCAASGFTFNKYAMNWVRQAPGKGLEWVARIRSKYNNYATYYADSVKDRFTISRDDSKNTAYLQMNNLKTEDTAVYYCVRHGNFGNSYISYWAYWGQGTLVTVSSGGGGSGGGGSGGGGSQTVVTQEPSLTVSPGGTVTLTCGSSTGAVTSGNYPNWVQQKPGQAPRGLIGGTKFLAPGTPARFSGSLLGGKAALTLSGVQPEDEAEYYCVLWYSNRWVFGGGTKLTVLGGGGDKTHTCPPCPAPELLGGPSVFLFPPKPKDTLMISRTPEVTCVVVDVSHEDPEVKFNWYVDGVEVHNAKTKPCEEQYGSTYRCVSVLTVLHQDWLNGKEYKCKVSNKALPAPIEKTISKAKGQPREPQVYTLPPSREEMTKNQVSLTCLVKGFYPSDIAVEWESNGQPENNYKTTPPVLDSDGSFFLYSKLTVDKSRWQQGNVFSCSVMHEALHNHYTQKSLSLSPGKGGGGSGGGGSGGGGSGGGGSGGGGSGGGGSDKTHTCPPCPAPELLGGPSVFLFPPKPKDTLMISRTPEVTCVVVDVSHEDPEVKFNWYVDGVEVHNAKTKPCEEQYGSTYRCVSVLTVLHQDWLNGKEYKCKVSNKALPAPIEKTISKAKGQPREPQVYTLPPSREEMTKNQVSLTCLVKGFYPSDIAVEWESNGQPENNYKTTPPVLDSDGSFFLYSKLTVDKSRWQQGNVFSCSVMHEALHNHYTQKSLSLSPGK

SEQ ID NO: 1617 - protein, 986 aa, Artificial Sequence
  Synthetic peptide
EVQLLESGGGMVQPGGSLRLSCAASGFTFSSYAMSWVRQAPGKCLEWVSAISGSGGRTFYADSVEGRFTISRDNSKNTLYLQMNSLRAEDTAVYYCTKHDYSNYPYFDYWGQGTLVTVSSGGGGSGGGGSGGGGSEIVLTQSPGTLSLSPGERATLSCRASQSVRSSYLAWYQQKPGQAPRLLIYGASSRATGIPDRFSGSGSGTDFTLTISRLEPEDFAVYYCQQYGDLPFTFGCGTKVDIKSGGGGSEVQLVESGGGLVQPGGSLKLSCAASGFTFNKYAMNWVRQAPGKGLEWVARIRSKYNNYATYYADSVKDRFTISRDDSKNTAYLQMNNLKTEDTAVYYCVRHGNFGNSYISYWAYWGQGTLVTVSSGGGGSGGGGSGGGGSQTVVTQEPSLTVSPGGTVTLTCGSSTGAVTSGNYPNWVQQKPGQAPRGLIGGTKFLAPGTPARFSGSLLGGKAALTLSGVQPEDEAEYYCVLWYSNRWVFGGGTKLTVLGGGGDKTHTCPPCPAPELLGGPSVFLFPPKPKDTLMISRTPEVTCVVVDVSHEDPEVKFNWYVDGVEVHNAKTKPCEEQYGSTYRCVSVLTVLHQDWLNGKEYKCKVSNKALPAPIEKTISKAKGQPREPQVYTLPPSREEMTKNQVSLTCLVKGFYPSDIAVEWESNGQPENNYKTTPPVLDSDGSFFLYSKLTVDKSRWQQGNVFSCSVMHEALHNHYTQKSLSLSPGKGGGGSGGGGSGGGGSGGGGSGGGGSGGGGSDKTHTCPPCPAPELLGGPSVFLFPPKPKDTLMISRTPEVTCVVVDVSHEDPEVKFNWYVDGVEVHNAKTKPCEEQYGSTYRCVSVLTVLHQDWLNGKEYKCKVSNKALPAPIEKTISKAKGQPREPQVYTLPPSREEMTKNQVSLTCLVKGFYPSDIAVEWESNGQPENNYKTTPPVLDSDGSFFLYSKLTVDKSRWQQGNVFSCSVMHEALHNHYTQKSLSLSPGK

SEQ ID NO: 1618 - protein, 986 aa, Artificial Sequence
  Synthetic peptide
EVQLLESGGGLVQPGGSLRLSCAASGFTFSTYAMSWVRQAPGKGLEWVSLISGSGGRTYYADSVKGRFTISRDNSKNTLYLQMNSLRAEDTAVYYCAKHDYSNYPYFDYWGQGTLVTVSSGGGGSGGGGSGGGGSEIVLTQSPGTLSLSPGERATLSCRASQGVRSSYLAWYQQKPGQAPRLLIYGASSRATGIPDRFSGSGSGTDFTLTINRLEPEDFAVYYCQQYGSSPPTFGGGTKVDIKSGGGGSEVQLVESGGGLVQPGGSLKLSCAASGFTFNKYAMNWVRQAPGKGLEWVARIRSKYNNYATYYADSVKDRFTISRDDSKNTAYLQMNNLKTEDTAVYYCVRHGNFGNSYISYWAYWGQGTLVTVSSGGGGSGGGGSGGGGSQTVVTQEPSLTVSPGGTVTLTCGSSTGAVTSGNYPNWVQQKPGQAPRGLIGGTKFLAPGTPARFSGSLLGGKAALTLSGVQPEDEAEYYCVLWYSNRWVFGGGTKLTVLGGGGDKTHTCPPCPAPELLGGPSVFLFPPKPKDTLMISRTPEVTCVVVDVSHEDPEVKFNWYVDGVEVHNAKTKPCEEQYGSTYRCVSVLTVLHQDWLNGKEYKCKVSNKALPAPIEKTISKAKGQPREPQVYTLPPSREEMTKNQVSLTCLVKGFYPSDIAVEWESNGQPENNYKTTPPVLDSDGSFFLYSKLTVDKSRWQQGNVFSCSVMHEALHNHYTQKSLSLSPGKGGGGSGGGGSGGGGSGGGGSGGGGSGGGGSDKTHTCPPCPAPELLGGPSVFLFPPKPKDTLMISRTPEVTCVVVDVSHEDPEVKFNWYVDGVEVHNAKTKPCEEQYGSTYRCVSVLTVLHQDWLNGKEYKCKVSNKALPAPIEKTISKAKGQPREPQVYTLPPSREEMTKNQVSLTCLVKGFYPSDIAVEWESNGQPENNYKTTPPVLDSDGSFFLYSKLTVDKSRWQQGNVFSCSVMHEALHNHYTQKSLSLSPGK

SEQ ID NO: 1619 - protein, 986 aa, Artificial Sequence
  Synthetic peptide
EVQLLESGGGLVQPGGSLRLSCAASGFTFSTYAMSWVRQAPGKCLEWVSLISGSGGRTYYADSVKGRFTISRDNSKNTLYLQMNSLRAEDTAVYYCAKHDYSNYPYFDYWGQGTLVTVSSGGGGSGGGGSGGGGSEIVLTQSPGTLSLSPGERATLSCRASQGVRSSYLAWYQQKPGQAPRLLIYGASSRATGIPDRFSGSGSGTDFTLTINRLEPEDFAVYYCQQYGSSPPTFGCGTKVDIKSGGGGSEVQLVESGGGLVQPGGSLKLSCAASGFTFNKYAMNWVRQAPGKGLEWVARIRSKYNNYATYYADSVKDRFTISRDDSKNTAYLQMNNLKTEDTAVYYCVRHGNFGNSYISYWAYWGQGTLVTVSSGGGGSGGGGSGGGGSQTVVTQEPSLTVSPGGTVTLTCGSSTGAVTSGNYPNWVQQKPGQAPRGLIGGTKFLAPGTPARFSGSLLGGKAALTLSGVQPEDEAEYYCVLWYSNRWVFGGGTKLTVLGGGGDKTHTCPPCPAPELLGGPSVFLFPPKPKDTLMISRTPEVTCVVVDVSHEDPEVKFNWYVDGVEVHNAKTKPCEEQYGSTYRCVSVLTVLHQDWLNGKEYKCKVSNKALPAPIEKTISKAKGQPREPQVYTLPPSREEMTKNQVSLTCLVKGFYPSDIAVEWESNGQPENNYKTTPPVLDSDGSFFLYSKLTVDKSRWQQGNVFSCSVMHEALHNHYTQKSLSLSPGKGGGGSGGGGSGGGGSGGGGSGGGGSGGGGSDKTHTCPPCPAPELLGGPSVFLFPPKPKDTLMISRTPEVTCVVVDVSHEDPEVKFNWYVDGVEVHNAKTKPCEEQYGSTYRCVSVLTVLHQDWLNGKEYKCKVSNKALPAPIEKTISKAKGQPREPQVYTLPPSREEMTKNQVSLTCLVKGFYPSDIAVEWESNGQPENNYKTTPPVLDSDGSFFLYSKLTVDKSRWQQGNVFSCSVMHEALHNHYTQKSLSLSPGK

SEQ ID NO: 1620 - protein, 986 aa, Artificial Sequence
  Synthetic peptide
EVQLLESGGGVVQPGRSLRLSCAASGFTFSSYAMSWVRQAPGKGLEWVSAISGSGGRTFYADSVEGRFTISRDNSKNTLYLQMNSLRAEDTAVYYCAKHDYSNYPYFDYWGQGTLVTVSSGGGGSGGGGSGGGGSEIVLTQSPGTLSLSPGERATLSCRASQSVRSNYLAWYQQKPGQAPRLLIYGASSRATGIPDRFSGSGSGTDFTLTINRLEPEDFAVYYCQQYGSSPPTFGGGTKVDIKSGGGGSEVQLVESGGGLVQPGGSLKLSCAASGFTFNKYAMNWVRQAPGKGLEWVARIRSKYNNYATYYADSVKDRFTISRDDSKNTAYLQMNNLKTEDTAVYYCVRHGNFGNSYISYWAYWGQGTLVTVSSGGGGSGGGGSGGGGSQTVVTQEPSLTVSPGGTVTLTCGSSTGAVTSGNYPNWVQQKPGQAPRGLIGGTKFLAPGTPARFSGSLLGGKAALTLSGVQPEDEAEYYCVLWYSNRWVFGGGTKLTVLGGGGDKTHTCPPCPAPELLGGPSVFLFPPKPKDTLMISRTPEVTCVVVDVSHEDPEVKFNWYVDGVEVHNAKTKPCEEQYGSTYRCVSVLTVLHQDWLNGKEYKCKVSNKALPAPIEKTISKAKGQPREPQVYTLPPSREEMTKNQVSLTCLVKGFYPSDIAVEWESNGQPENNYKTTPPVLDSDGSFFLYSKLTVDKSRWQQGNVFSCSVMHEALHNHYTQKSLSLSPGKGGGGSGGGGSGGGGSGGGGSGGGGSGGGGSDKTHTCPPCPAPELLGGPSVFLFPPKPKDTLMISRTPEVTCVVVDVSHEDPEVKFNWYVDGVEVHNAKTKPCEEQYGSTYRCVSVLTVLHQDWLNGKEYKCKVSNKALPAPIEKTISKAKGQPREPQVYTLPPSREEMTKNQVSLTCLVKGFYPSDIAVEWESNGQPENNYKTTPPVLDSDGSFFLYSKLTVDKSRWQQGNVFSCSVMHEALHNHYTQKSLSLSPGK

SEQ ID NO: 1621 - protein, 986 aa, Artificial Sequence
  Synthetic peptide
EVQLLESGGGVVQPGRSLRLSCAASGFTFSSYAMSWVRQAPGKCLEWVSAISGSGGRTFYADSVEGRFTISRDNSKNTLYLQMNSLRAEDTAVYYCAKHDYSNYPYFDYWGQGTLVTVSSGGGGSGGGGSGGGGSEIVLTQSPGTLSLSPGERATLSCRASQSVRSNYLAWYQQKPGQAPRLLIYGASSRATGIPDRFSGSGSGTDFTLTINRLEPEDFAVYYCQQYGSSPPTFGCGTKVDIKSGGGGSEVQLVESGGGLVQPGGSLKLSCAASGFTFNKYAMNWVRQAPGKGLEWVARIRSKYNNYATYYADSVKDRFTISRDDSKNTAYLQMNNLKTEDTAVYYCVRHGNFGNSYISYWAYWGQGTLVTVSSGGGGSGGGGSGGGGSQTVVTQEPSLTVSPGGTVTLTCGSSTGAVTSGNYPNWVQQKPGQAPRGLIGGTKFLAPGTPARFSGSLLGGKAALTLSGVQPEDEAEYYCVLWYSNRWVFGGGTKLTVLGGGGDKTHTCPPCPAPELLGGPSVFLFPPKPKDTLMISRTPEVTCVVVDVSHEDPEVKFNWYVDGVEVHNAKTKPCEEQYGSTYRCVSVLTVLHQDWLNGKEYKCKVSNKALPAPIEKTISKAKGQPREPQVYTLPPSREEMTKNQVSLTCLVKGFYPSDIAVEWESNGQPENNYKTTPPVLDSDGSFFLYSKLTVDKSRWQQGNVFSCSVMHEALHNHYTQKSLSLSPGKGGGGSGGGGSGGGGSGGGGSGGGGSGGGGSDKTHTCPPCPAPELLGGPSVFLFPPKPKDTLMISRTPEVTCVVVDVSHEDPEVKFNWYVDGVEVHNAKTKPCEEQYGSTYRCVSVLTVLHQDWLNGKEYKCKVSNKALPAPIEKTISKAKGQPREPQVYTLPPSREEMTKNQVSLTCLVKGFYPSDIAVEWESNGQPENNYKTTPPVLDSDGSFFLYSKLTVDKSRWQQGNVFSCSVMHEALHNHYTQKSLSLSPGK

SEQ ID NO: 1622 - protein, 985 aa, Artificial Sequence
  Synthetic peptide
EVQLLESGGGLVQPGGSLRLSCAASGFTFSSYAMSWVRQAPGKGLEWVSVISDSGGITDFADSVKGRFTISRDNSRNTLYLQMNSLRAEDTAVYFCARHDYSNYFFFDYWGQGTLVTVSSGGGGSGGGGSGGGGSDIQMTQSPSSLSASVGDRVTITCRASQGISNYLAWYQQKPGKVPKLLIYAASILQSGVPSKFSGSGSGTDFTLTISSLQPEDFAIYYCQQYFAYPITFGQGTRLEIKSGGGGSEVQLVESGGGLVQPGGSLKLSCAASGFTFNKYAMNWVRQAPGKGLEWVARIRSKYNNYATYYADSVKDRFTISRDDSKNTAYLQMNNLKTEDTAVYYCVRHGNFGNSYISYWAYWGQGTLVTVSSGGGGSGGGGSGGGGSQTVVTQEPSLTVSPGGTVTLTCGSSTGAVTSGNYPNWVQQKPGQAPRGLIGGTKFLAPGTPARFSGSLLGGKAALTLSGVQPEDEAEYYCVLWYSNRWVFGGGTKLTVLGGGGDKTHTCPPCPAPELLGGPSVFLFPPKPKDTLMISRTPEVTCVVVDVSHEDPEVKFNWYVDGVEVHNAKTKPCEEQYGSTYRCVSVLTVLHQDWLNGKEYKCKVSNKALPAPIEKTISKAKGQPREPQVYTLPPSREEMTKNQVSLTCLVKGFYPSDIAVEWESNGQPENNYKTTPPVLDSDGSFFLYSKLTVDKSRWQQGNVFSCSVMHEALHNHYTQKSLSLSPGKGGGGSGGGGSGGGGSGGGGSGGGGSGGGGSDKTHTCPPCPAPELLGGPSVFLFPPKPKDTLMISRTPEVTCVVVDVSHEDPEVKFNWYVDGVEVHNAKTKPCEEQYGSTYRCVSVLTVLHQDWLNGKEYKCKVSNKALPAPIEKTISKAKGQPREPQVYTLPPSREEMTKNQVSLTCLVKGFYPSDIAVEWESNGQPENNYKTTPPVLDSDGSFFLYSKLTVDKSRWQQGNVFSCSVMHEALHNHYTQKSLSLSPGK

SEQ ID NO: 1623 - protein, 985 aa, Artificial Sequence
  Synthetic peptide
EVQLLESGGGLVQPGGSLRLSCAASGFTFSSYAMSWVRQAPGKCLEWVSVISDSGGITDFADSVKGRFTISRDNSRNTLYLQMNSLRAEDTAVYFCARHDYSNYFFFDYWGQGTLVTVSSGGGGSGGGGSGGGGSDIQMTQSPSSLSASVGDRVTITCRASQGISNYLAWYQQKPGKVPKLLIYAASILQSGVPSKFSGSGSGTDFTLTISSLQPEDFAIYYCQQYFAYPITFGCGTRLEIKSGGGGSEVQLVESGGGLVQPGGSLKLSCAASGFTFNKYAMNWVRQAPGKGLEWVARIRSKYNNYATYYADSVKDRFTISRDDSKNTAYLQMNNLKTEDTAVYYCVRHGNFGNSYISYWAYWGQGTLVTVSSGGGGSGGGGSGGGGSQTVVTQEPSLTVSPGGTVTLTCGSSTGAVTSGNYPNWVQQKPGQAPRGLIGGTKFLAPGTPARFSGSLLGGKAALTLSGVQPEDEAEYYCVLWYSNRWVFGGGTKLTVLGGGGDKTHTCPPCPAPELLGGPSVFLFPPKPKDTLMISRTPEVTCVVVDVSHEDPEVKFNWYVDGVEVHNAKTKPCEEQYGSTYRCVSVLTVLHQDWLNGKEYKCKVSNKALPAPIEKTISKAKGQPREPQVYTLPPSREEMTKNQVSLTCLVKGFYPSDIAVEWESNGQPENNYKTTPPVLDSDGSFFLYSKLTVDKSRWQQGNVFSCSVMHEALHNHYTQKSLSLSPGKGGGGSGGGGSGGGGSGGGGSGGGGSGGGGSDKTHTCPPCPAPELLGGPSVFLFPPKPKDTLMISRTPEVTCVVVDVSHEDPEVKFNWYVDGVEVHNAKTKPCEEQYGSTYRCVSVLTVLHQDWLNGKEYKCKVSNKALPAPIEKTISKAKGQPREPQVYTLPPSREEMTKNQVSLTCLVKGFYPSDIAVEWESNGQPENNYKTTPPVLDSDGSFFLYSKLTVDKSRWQQGNVFSCSVMHEALHNHYTQKSLSLSPGK

SEQ ID NO: 1624 - protein, 986 aa, Artificial Sequence
  Synthetic peptide
EVQLLESGGGMVQPGGSLRLSCAASGFTFSSYAMSWVRQAPGKGLEWVSAISGSGGRTFYADSVEGRFTISRDNSKNTLYLQMNSLRAEDTAVYYCAKHDYSNYPYFDYWGQGTLVTVSSGGGGSGGGGSGGGGSEIVLTQSPGTLSLSPGERATLSCRASQSVRSSYLAWYQQKPGQAPRLLIYGASSRATGIPDRFSGSGSGTDFTLTISRLEPEDFAVYFCQQYGSSPPTFGGGTRLEIKSGGGGSEVQLVESGGGLVQPGGSLKLSCAASGFTFNKYAMNWVRQAPGKGLEWVARIRSKYNNYATYYADSVKDRFTISRDDSKNTAYLQMNNLKTEDTAVYYCVRHGNFGNSYISYWAYWGQGTLVTVSSGGGGSGGGGSGGGGSQTVVTQEPSLTVSPGGTVTLTCGSSTGAVTSGNYPNWVQQKPGQAPRGLIGGTKFLAPGTPARFSGSLLGGKAALTLSGVQPEDEAEYYCVLWYSNRWVFGGGTKLTVLGGGGDKTHTCPPCPAPELLGGPSVFLFPPKPKDTLMISRTPEVTCVVVDVSHEDPEVKFNWYVDGVEVHNAKTKPCEEQYGSTYRCVSVLTVLHQDWLNGKEYKCKVSNKALPAPIEKTISKAKGQPREPQVYTLPPSREEMTKNQVSLTCLVKGFYPSDIAVEWESNGQPENNYKTTPPVLDSDGSFFLYSKLTVDKSRWQQGNVFSCSVMHEALHNHYTQKSLSLSPGKGGGGSGGGGSGGGGSGGGGSGGGGSGGGGSDKTHTCPPCPAPELLGGPSVFLFPPKPKDTLMISRTPEVTCVVVDVSHEDPEVKFNWYVDGVEVHNAKTKPCEEQYGSTYRCVSVLTVLHQDWLNGKEYKCKVSNKALPAPIEKTISKAKGQPREPQVYTLPPSREEMTKNQVSLTCLVKGFYPSDIAVEWESNGQPENNYKTTPPVLDSDGSFFLYSKLTVDKSRWQQGNVFSCSVMHEALHNHYTQKSLSLSPGK

SEQ ID NO: 1625 - protein, 986 aa, Artificial Sequence
  Synthetic peptide
EVQLLESGGGMVQPGGSLRLSCAASGFTFSSYAMSWVRQAPGKCLEWVSAISGSGGRTFYADSVEGRFTISRDNSKNTLYLQMNSLRAEDTAVYYCAKHDYSNYPYFDYWGQGTLVTVSSGGGGSGGGGSGGGGSEIVLTQSPGTLSLSPGERATLSCRASQSVRSSYLAWYQQKPGQAPRLLIYGASSRATGIPDRFSGSGSGTDFTLTISRLEPEDFAVYFCQQYGSSPPTFGCGTRLEIKSGGGGSEVQLVESGGGLVQPGGSLKLSCAASGFTFNKYAMNWVRQAPGKGLEWVARIRSKYNNYATYYADSVKDRFTISRDDSKNTAYLQMNNLKTEDTAVYYCVRHGNFGNSYISYWAYWGQGTLVTVSSGGGGSGGGGSGGGGSQTVVTQEPSLTVSPGGTVTLTCGSSTGAVTSGNYPNWVQQKPGQAPRGLIGGTKFLAPGTPARFSGSLLGGKAALTLSGVQPEDEAEYYCVLWYSNRWVFGGGTKLTVLGGGGDKTHTCPPCPAPELLGGPSVFLFPPKPKDTLMISRTPEVTCVVVDVSHEDPEVKFNWYVDGVEVHNAKTKPCEEQYGSTYRCVSVLTVLHQDWLNGKEYKCKVSNKALPAPIEKTISKAKGQPREPQVYTLPPSREEMTKNQVSLTCLVKGFYPSDIAVEWESNGQPENNYKTTPPVLDSDGSFFLYSKLTVDKSRWQQGNVFSCSVMHEALHNHYTQKSLSLSPGKGGGGSGGGGSGGGGSGGGGSGGGGSGGGGSDKTHTCPPCPAPELLGGPSVFLFPPKPKDTLMISRTPEVTCVVVDVSHEDPEVKFNWYVDGVEVHNAKTKPCEEQYGSTYRCVSVLTVLHQDWLNGKEYKCKVSNKALPAPIEKTISKAKGQPREPQVYTLPPSREEMTKNQVSLTCLVKGFYPSDIAVEWESNGQPENNYKTTPPVLDSDGSFFLYSKLTVDKSRWQQGNVFSCSVMHEALHNHYTQKSLSLSPGK

SEQ ID NO: 1626 - protein, 986 aa, Artificial Sequence
  Synthetic peptide
EVQLLESGGGLVQPGGSLRLSCAASGFTFSIYAMSWVRQAPGKGLEWVSAIGDSGGSTFYADSVKGRFTISRDNSKNTLYLQMNSLRAEDTAVYYCAKHDYSNYPYFDYWGQGTLVTVSSGGGGSGGGGSGGGGSEIVLTQSPGTLSLSPGERATLSCRASQSVRSSYVAWYQQKPGQAPRLLIYGASSRATGIPDRFSGSGSGTDFTLTISRLEPEDFAVYYCQQYGDLPFTFGPGTRLEIKSGGGGSEVQLVESGGGLVQPGGSLKLSCAASGFTFNKYAMNWVRQAPGKGLEWVARIRSKYNNYATYYADSVKDRFTISRDDSKNTAYLQMNNLKTEDTAVYYCVRHGNFGNSYISYWAYWGQGTLVTVSSGGGGSGGGGSGGGGSQTVVTQEPSLTVSPGGTVTLTCGSSTGAVTSGNYPNWVQQKPGQAPRGLIGGTKFLAPGTPARFSGSLLGGKAALTLSGVQPEDEAEYYCVLWYSNRWVFGGGTKLTVLGGGGDKTHTCPPCPAPELLGGPSVFLFPPKPKDTLMISRTPEVTCVVVDVSHEDPEVKFNWYVDGVEVHNAKTKPCEEQYGSTYRCVSVLTVLHQDWLNGKEYKCKVSNKALPAPIEKTISKAKGQPREPQVYTLPPSREEMTKNQVSLTCLVKGFYPSDIAVEWESNGQPENNYKTTPPVLDSDGSFFLYSKLTVDKSRWQQGNVFSCSVMHEALHNHYTQKSLSLSPGKGGGGSGGGGSGGGGSGGGGSGGGGSGGGGSDKTHTCPPCPAPELLGGPSVFLFPPKPKDTLMISRTPEVTCVVVDVSHEDPEVKFNWYVDGVEVHNAKTKPCEEQYGSTYRCVSVLTVLHQDWLNGKEYKCKVSNKALPAPIEKTISKAKGQPREPQVYTLPPSREEMTKNQVSLTCLVKGFYPSDIAVEWESNGQPENNYKTTPPVLDSDGSFFLYSKLTVDKSRWQQGNVFSCSVMHEALHNHYTQKSLSLSPGK

SEQ ID NO: 1627 - protein, 986 aa, Artificial Sequence
  Synthetic peptide
EVQLLESGGGLVQPGGSLRLSCAASGFTFSIYAMSWVRQAPGKCLEWVSAIGDSGGSTFYADSVKGRFTISRDNSKNTLYLQMNSLRAEDTAVYYCAKHDYSNYPYFDYWGQGTLVTVSSGGGGSGGGGSGGGGSEIVLTQSPGTLSLSPGERATLSCRASQSVRSSYVAWYQQKPGQAPRLLIYGASSRATGIPDRFSGSGSGTDFTLTISRLEPEDFAVYYCQQYGDLPFTFGCGTRLEIKSGGGGSEVQLVESGGGLVQPGGSLKLSCAASGFTFNKYAMNWVRQAPGKGLEWVARIRSKYNNYATYYADSVKDRFTISRDDSKNTAYLQMNNLKTEDTAVYYCVRHGNFGNSYISYWAYWGQGTLVTVSSGGGGSGGGGSGGGGSQTVVTQEPSLTVSPGGTVTLTCGSSTGAVTSGNYPNWVQQKPGQAPRGLIGGTKFLAPGTPARFSGSLLGGKAALTLSGVQPEDEAEYYCVLWYSNRWVFGGGTKLTVLGGGGDKTHTCPPCPAPELLGGPSVFLFPPKPKDTLMISRTPEVTCVVVDVSHEDPEVKFNWYVDGVEVHNAKTKPCEEQYGSTYRCVSVLTVLHQDWLNGKEYKCKVSNKALPAPIEKTISKAKGQPREPQVYTLPPSREEMTKNQVSLTCLVKGFYPSDIAVEWESNGQPENNYKTTPPVLDSDGSFFLYSKLTVDKSRWQQGNVFSCSVMHEALHNHYTQKSLSLSPGKGGGGSGGGGSGGGGSGGGGSGGGGSGGGGSDKTHTCPPCPAPELLGGPSVFLFPPKPKDTLMISRTPEVTCVVVDVSHEDPEVKFNWYVDGVEVHNAKTKPCEEQYGSTYRCVSVLTVLHQDWLNGKEYKCKVSNKALPAPIEKTISKAKGQPREPQVYTLPPSREEMTKNQVSLTCLVKGFYPSDIAVEWESNGQPENNYKTTPPVLDSDGSFFLYSKLTVDKSRWQQGNVFSCSVMHEALHNHYTQKSLSLSPGK

SEQ ID NO: 1628 - protein, 990 aa, Artificial Sequence
  Synthetic peptide
QVQLQESGPGLVKPSQTLSLTCTVSGGSISSSSYYWGWIRQPPGKGLEWIGSIYHSGGTYFNPSLKSRVTISVDTSKNQFSLKLSSVTAADTAVYYCARHYEILTGYYPDVFDIWGQGTMVTVSSGGGGSGGGGSGGGGSDIQMTQSPSSLSASVGDRVTITCRASQSISSYLNWYQQKPGKAPKLLIYAASNLQSGVSSRFSGSGSGTDFTLTISSLQPEDFATYYCQQSFSSPRTFGQGTKVEIKSGGGGSEVQLVESGGGLVQPGGSLKLSCAASGFTFNKYAMNWVRQAPGKGLEWVARIRSKYNNYATYYADSVKDRFTISRDDSKNTAYLQMNNLKTEDTAVYYCVRHGNFGNSYISYWAYWGQGTLVTVSSGGGGSGGGGSGGGGSQTVVTQEPSLTVSPGGTVTLTCGSSTGAVTSGNYPNWVQQKPGQAPRGLIGGTKFLAPGTPARFSGSLLGGKAALTLSGVQPEDEAEYYCVLWYSNRWVFGGGTKLTVLGGGGDKTHTCPPCPAPELLGGPSVFLFPPKPKDTLMISRTPEVTCVVVDVSHEDPEVKFNWYVDGVEVHNAKTKPCEEQYGSTYRCVSVLTVLHQDWLNGKEYKCKVSNKALPAPIEKTISKAKGQPREPQVYTLPPSREEMTKNQVSLTCLVKGFYPSDIAVEWESNGQPENNYKTTPPVLDSDGSFFLYSKLTVDKSRWQQGNVFSCSVMHEALHNHYTQKSLSLSPGKGGGGSGGGGSGGGGSGGGGSGGGGSGGGGSDKTHTCPPCPAPELLGGPSVFLFPPKPKDTLMISRTPEVTCVVVDVSHEDPEVKFNWYVDGVEVHNAKTKPCEEQYGSTYRCVSVLTVLHQDWLNGKEYKCKVSNKALPAPIEKTISKAKGQPREPQVYTLPPSREEMTKNQVSLTCLVKGFYPSDIAVEWESNGQPENNYKTTPPVLDSDGSFFLYSKLTVDKSRWQQGNVFSCSVMHEALHNHYTQKSLSLSPGK

SEQ ID NO: 1629 - protein, 990 aa, Artificial Sequence
  Synthetic peptide
QVQLQESGPGLVKPSQTLSLTCTVSGGSISSSSYYWGWIRQPPGKCLEWIGSIYHSGGTYFNPSLKSRVTISVDTSKNQFSLKLSSVTAADTAVYYCARHYEILTGYYPDVFDIWGQGTMVTVSSGGGGSGGGGSGGGGSDIQMTQSPSSLSASVGDRVTITCRASQSISSYLNWYQQKPGKAPKLLIYAASNLQSGVSSRFSGSGSGTDFTLTISSLQPEDFATYYCQQSFSSPRTFGCGTKVEIKSGGGGSEVQLVESGGGLVQPGGSLKLSCAASGFTFNKYAMNWVRQAPGKGLEWVARIRSKYNNYATYYADSVKDRFTISRDDSKNTAYLQMNNLKTEDTAVYYCVRHGNFGNSYISYWAYWGQGTLVTVSSGGGGSGGGGSGGGGSQTVVTQEPSLTVSPGGTVTLTCGSSTGAVTSGNYPNWVQQKPGQAPRGLIGGTKFLAPGTPARFSGSLLGGKAALTLSGVQPEDEAEYYCVLWYSNRWVFGGGTKLTVLGGGGDKTHTCPPCPAPELLGGPSVFLFPPKPKDTLMISRTPEVTCVVVDVSHEDPEVKFNWYVDGVEVHNAKTKPCEEQYGSTYRCVSVLTVLHQDWLNGKEYKCKVSNKALPAPIEKTISKAKGQPREPQVYTLPPSREEMTKNQVSLTCLVKGFYPSDIAVEWESNGQPENNYKTTPPVLDSDGSFFLYSKLTVDKSRWQQGNVFSCSVMHEALHNHYTQKSLSLSPGKGGGGSGGGGSGGGGSGGGGSGGGGSGGGGSDKTHTCPPCPAPELLGGPSVFLFPPKPKDTLMISRTPEVTCVVVDVSHEDPEVKFNWYVDGVEVHNAKTKPCEEQYGSTYRCVSVLTVLHQDWLNGKEYKCKVSNKALPAPIEKTISKAKGQPREPQVYTLPPSREEMTKNQVSLTCLVKGFYPSDIAVEWESNGQPENNYKTTPPVLDSDGSFFLYSKLTVDKSRWQQGNVFSCSVMHEALHNHYTQKSLSLSPGK

SEQ ID NO: 1630 - protein, 985 aa, Artificial Sequence
  Synthetic peptide
EVQLVESGGGLVKPGGSLRLSCAASGFTFSSYSMNWVRQAPGKGLEWVSYISSSGGYIYYADSVKGRFTISRDNAKNSLYLQMNSLRAEDAAVYYCSRGDYSNYAYFDYWGQGTLVTVSSGGGGSGGGGSGGGGSDIQMTQSPSSLSASVGDRVTITCRASQGISNYLAWYQQKPGKVPKLLIYAASTLQSGVPSRFSGSGSGTDFTLTISSLQAEDVAVYYCQQYYSTPLTFGGGTKVEIKSGGGGSEVQLVESGGGLVQPGGSLKLSCAASGFTFNKYAMNWVRQAPGKGLEWVARIRSKYNNYATYYADSVKDRFTISRDDSKNTAYLQMNNLKTEDTAVYYCVRHGNFGNSYISYWAYWGQGTLVTVSSGGGGSGGGGSGGGGSQTVVTQEPSLTVSPGGTVTLTCGSSTGAVTSGNYPNWVQQKPGQAPRGLIGGTKFLAPGTPARFSGSLLGGKAALTLSGVQPEDEAEYYCVLWYSNRWVFGGGTKLTVLGGGGDKTHTCPPCPAPELLGGPSVFLFPPKPKDTLMISRTPEVTCVVVDVSHEDPEVKFNWYVDGVEVHNAKTKPCEEQYGSTYRCVSVLTVLHQDWLNGKEYKCKVSNKALPAPIEKTISKAKGQPREPQVYTLPPSREEMTKNQVSLTCLVKGFYPSDIAVEWESNGQPENNYKTTPPVLDSDGSFFLYSKLTVDKSRWQQGNVFSCSVMHEALHNHYTQKSLSLSPGKGGGGSGGGGSGGGGSGGGGSGGGGSGGGGSDKTHTCPPCPAPELLGGPSVFLFPPKPKDTLMISRTPEVTCVVVDVSHEDPEVKFNWYVDGVEVHNAKTKPCEEQYGSTYRCVSVLTVLHQDWLNGKEYKCKVSNKALPAPIEKTISKAKGQPREPQVYTLPPSREEMTKNQVSLTCLVKGFYPSDIAVEWESNGQPENNYKTTPPVLDSDGSFFLYSKLTVDKSRWQQGNVFSCSVMHEALHNHYTQKSLSLSPGK

SEQ ID NO: 1631 - protein, 985 aa, Artificial Sequence
  Synthetic peptide
EVQLVESGGGLVKPGGSLRLSCAASGFTFSSYSMNWVRQAPGKCLEWVSYISSSGGYIYYADSVKGRFTISRDNAKNSLYLQMNSLRAEDAAVYYCSRGDYSNYAYFDYWGQGTLVTVSSGGGGSGGGGSGGGGSDIQMTQSPSSLSASVGDRVTITCRASQGISNYLAWYQQKPGKVPKLLIYAASTLQSGVPSRFSGSGSGTDFTLTISSLQAEDVAVYYCQQYYSTPLTFGCGTKVEIKSGGGGSEVQLVESGGGLVQPGGSLKLSCAASGFTFNKYAMNWVRQAPGKGLEWVARIRSKYNNYATYYADSVKDRFTISRDDSKNTAYLQMNNLKTEDTAVYYCVRHGNFGNSYISYWAYWGQGTLVTVSSGGGGSGGGGSGGGGSQTVVTQEPSLTVSPGGTVTLTCGSSTGAVTSGNYPNWVQQKPGQAPRGLIGGTKFLAPGTPARFSGSLLGGKAALTLSGVQPEDEAEYYCVLWYSNRWVFGGGTKLTVLGGGGDKTHTCPPCPAPELLGGPSVFLFPPKPKDTLMISRTPEVTCVVVDVSHEDPEVKFNWYVDGVEVHNAKTKPCEEQYGSTYRCVSVLTVLHQDWLNGKEYKCKVSNKALPAPIEKTISKAKGQPREPQVYTLPPSREEMTKNQVSLTCLVKGFYPSDIAVEWESNGQPENNYKTTPPVLDSDGSFFLYSKLTVDKSRWQQGNVFSCSVMHEALHNHYTQKSLSLSPGKGGGGSGGGGSGGGGSGGGGSGGGGSGGGGSDKTHTCPPCPAPELLGGPSVFLFPPKPKDTLMISRTPEVTCVVVDVSHEDPEVKFNWYVDGVEVHNAKTKPCEEQYGSTYRCVSVLTVLHQDWLNGKEYKCKVSNKALPAPIEKTISKAKGQPREPQVYTLPPSREEMTKNQVSLTCLVKGFYPSDIAVEWESNGQPENNYKTTPPVLDSDGSFFLYSKLTVDKSRWQQGNVFSCSVMHEALHNHYTQKSLSLSPGK

SEQ ID NO: 1632 - protein, 986 aa, Artificial Sequence
  Synthetic peptide
EVQLLESGGGLVQPGGSLRLSCAASGFTFSVYAMSWVRQAPGKGLEWVSTISDSGGSTFYADSVKGRFTISRDNSKNTLYLQMNRLRAEDTAVYYCARHDYSNYAYFDYWGQGTLVTVSSGGGGSGGGGSGGGGSEIVLTQSPGTLSLSPGERATLSCRASQSVRSSYLAWYQQKPGQAPRLLIYGASSRATGIPDRFSGSGSGTDFTLTISRLEPEDFAVYYCQQYGDLPFTFGPGTKVEIKSGGGGSEVQLVESGGGLVQPGGSLKLSCAASGFTFNKYAMNWVRQAPGKGLEWVARIRSKYNNYATYYADSVKDRFTISRDDSKNTAYLQMNNLKTEDTAVYYCVRHGNFGNSYISYWAYWGQGTLVTVSSGGGGSGGGGSGGGGSQTVVTQEPSLTVSPGGTVTLTCGSSTGAVTSGNYPNWVQQKPGQAPRGLIGGTKFLAPGTPARFSGSLLGGKAALTLSGVQPEDEAEYYCVLWYSNRWVFGGGTKLTVLGGGGDKTHTCPPCPAPELLGGPSVFLFPPKPKDTLMISRTPEVTCVVVDVSHEDPEVKFNWYVDGVEVHNAKTKPCEEQYGSTYRCVSVLTVLHQDWLNGKEYKCKVSNKALPAPIEKTISKAKGQPREPQVYTLPPSREEMTKNQVSLTCLVKGFYPSDIAVEWESNGQPENNYKTTPPVLDSDGSFFLYSKLTVDKSRWQQGNVFSCSVMHEALHNHYTQKSLSLSPGKGGGGSGGGGSGGGGSGGGGSGGGGSGGGGSDKTHTCPPCPAPELLGGPSVFLFPPKPKDTLMISRTPEVTCVVVDVSHEDPEVKFNWYVDGVEVHNAKTKPCEEQYGSTYRCVSVLTVLHQDWLNGKEYKCKVSNKALPAPIEKTISKAKGQPREPQVYTLPPSREEMTKNQVSLTCLVKGFYPSDIAVEWESNGQPENNYKTTPPVLDSDGSFFLYSKLTVDKSRWQQGNVFSCSVMHEALHNHYTQKSLSLSPGK

SEQ ID NO: 1633 - protein, 986 aa, Artificial Sequence
  Synthetic peptide
EVQLLESGGGLVQPGGSLRLSCAASGFTFSVYAMSWVRQAPGKCLEWVSTISDSGGSTFYADSVKGRFTISRDNSKNTLYLQMNRLRAEDTAVYYCARHDYSNYAYFDYWGQGTLVTVSSGGGGSGGGGSGGGGSEIVLTQSPGTLSLSPGERATLSCRASQSVRSSYLAWYQQKPGQAPRLLIYGASSRATGIPDRFSGSGSGTDFTLTISRLEPEDFAVYYCQQYGDLPFTFGCGTKVEIKSGGGGSEVQLVESGGGLVQPGGSLKLSCAASGFTFNKYAMNWVRQAPGKGLEWVARIRSKYNNYATYYADSVKDRFTISRDDSKNTAYLQMNNLKTEDTAVYYCVRHGNFGNSYISYWAYWGQGTLVTVSSGGGGSGGGGSGGGGSQTVVTQEPSLTVSPGGTVTLTCGSSTGAVTSGNYPNWVQQKPGQAPRGLIGGTKFLAPGTPARFSGSLLGGKAALTLSGVQPEDEAEYYCVLWYSNRWVFGGGTKLTVLGGGGDKTHTCPPCPAPELLGGPSVFLFPPKPKDTLMISRTPEVTCVVVDVSHEDPEVKFNWYVDGVEVHNAKTKPCEEQYGSTYRCVSVLTVLHQDWLNGKEYKCKVSNKALPAPIEKTISKAKGQPREPQVYTLPPSREEMTKNQVSLTCLVKGFYPSDIAVEWESNGQPENNYKTTPPVLDSDGSFFLYSKLTVDKSRWQQGNVFSCSVMHEALHNHYTQKSLSLSPGKGGGGSGGGGSGGGGSGGGGSGGGGSGGGGSDKTHTCPPCPAPELLGGPSVFLFPPKPKDTLMISRTPEVTCVVVDVSHEDPEVKFNWYVDGVEVHNAKTKPCEEQYGSTYRCVSVLTVLHQDWLNGKEYKCKVSNKALPAPIEKTISKAKGQPREPQVYTLPPSREEMTKNQVSLTCLVKGFYPSDIAVEWESNGQPENNYKTTPPVLDSDGSFFLYSKLTVDKSRWQQGNVFSCSVMHEALHNHYTQKSLSLSPGK

SEQ ID NO: 1634 - protein, 989 aa, Artificial Sequence
  Synthetic peptide
QVQLVESGGGVVQPGRSLRLSCAASGFMFSSYGMHWVRQAPGKGLEWVAVISYDGSNKYYADSVKGRFTISRDNSKNTLYLQMNSLRAEDTAVYYCARGRYYGSGNYNHGMDVWGQGTTVTVSSGGGGSGGGGSGGGGSDIQMTQSPSSLSASVGDRVTITCRASQSISSYLNWYQQKPGKAPKLLIYAASSLQSGVPSRFSGRGSGTDFTLTISSLQPEDFATYYCQQSYSTPFTFGPGTKVEIKSGGGGSEVQLVESGGGLVQPGGSLKLSCAASGFTFNKYAMNWVRQAPGKGLEWVARIRSKYNNYATYYADSVKDRFTISRDDSKNTAYLQMNNLKTEDTAVYYCVRHGNFGNSYISYWAYWGQGTLVTVSSGGGGSGGGGSGGGGSQTVVTQEPSLTVSPGGTVTLTCGSSTGAVTSGNYPNWVQQKPGQAPRGLIGGTKFLAPGTPARFSGSLLGGKAALTLSGVQPEDEAEYYCVLWYSNRWVFGGGTKLTVLGGGGDKTHTCPPCPAPELLGGPSVFLFPPKPKDTLMISRTPEVTCVVVDVSHEDPEVKFNWYVDGVEVHNAKTKPCEEQYGSTYRCVSVLTVLHQDWLNGKEYKCKVSNKALPAPIEKTISKAKGQPREPQVYTLPPSREEMTKNQVSLTCLVKGFYPSDIAVEWESNGQPENNYKTTPPVLDSDGSFFLYSKLTVDKSRWQQGNVFSCSVMHEALHNHYTQKSLSLSPGKGGGGSGGGGSGGGGSGGGGSGGGGSGGGGSDKTHTCPPCPAPELLGGPSVFLFPPKPKDTLMISRTPEVTCVVVDVSHEDPEVKFNWYVDGVEVHNAKTKPCEEQYGSTYRCVSVLTVLHQDWLNGKEYKCKVSNKALPAPIEKTISKAKGQPREPQVYTLPPSREEMTKNQVSLTCLVKGFYPSDIAVEWESNGQPENNYKTTPPVLDSDGSFFLYSKLTVDKSRWQQGNVFSCSVMHEALHNHYTQKSLSLSPGK

SEQ ID NO: 1635 - protein, 989 aa, Artificial Sequence
  Synthetic peptide
QVQLVESGGGVVQPGRSLRLSCAASGFMFSSYGMHWVRQAPGKCLEWVAVISYDGSNKYYADSVKGRFTISRDNSKNTLYLQMNSLRAEDTAVYYCARGRYYGSGNYNHGMDVWGQGTTVTVSSGGGGSGGGGSGGGGSDIQMTQSPSSLSASVGDRVTITCRASQSISSYLNWYQQKPGKAPKLLIYAASSLQSGVPSRFSGRGSGTDFTLTISSLQPEDFATYYCQQSYSTPFTFGCGTKVEIKSGGGGSEVQLVESGGGLVQPGGSLKLSCAASGFTFNKYAMNWVRQAPGKGLEWVARIRSKYNNYATYYADSVKDRFTISRDDSKNTAYLQMNNLKTEDTAVYYCVRHGNFGNSYISYWAYWGQGTLVTVSSGGGGSGGGGSGGGGSQTVVTQEPSLTVSPGGTVTLTCGSSTGAVTSGNYPNWVQQKPGQAPRGLIGGTKFLAPGTPARFSGSLLGGKAALTLSGVQPEDEAEYYCVLWYSNRWVFGGGTKLTVLGGGGDKTHTCPPCPAPELLGGPSVFLFPPKPKDTLMISRTPEVTCVVVDVSHEDPEVKFNWYVDGVEVHNAKTKPCEEQYGSTYRCVSVLTVLHQDWLNGKEYKCKVSNKALPAPIEKTISKAKGQPREPQVYTLPPSREEMTKNQVSLTCLVKGFYPSDIAVEWESNGQPENNYKTTPPVLDSDGSFFLYSKLTVDKSRWQQGNVFSCSVMHEALHNHYTQKSLSLSPGKGGGGSGGGGSGGGGSGGGGSGGGGSGGGGSDKTHTCPPCPAPELLGGPSVFLFPPKPKDTLMISRTPEVTCVVVDVSHEDPEVKFNWYVDGVEVHNAKTKPCEEQYGSTYRCVSVLTVLHQDWLNGKEYKCKVSNKALPAPIEKTISKAKGQPREPQVYTLPPSREEMTKNQVSLTCLVKGFYPSDIAVEWESNGQPENNYKTTPPVLDSDGSFFLYSKLTVDKSRWQQGNVFSCSVMHEALHNHYTQKSLSLSPGK

SEQ ID NO: 1636 - protein, 984 aa, Artificial Sequence
  Synthetic peptide
EVQLLESGGGLVQPGGSLRLSCAASGFTFSSYAMSWVRQAPGKGLEWVSVISGSGGRPNYADSVKGRFTISRDNSKNTLYLQMNSLRDEDTAVYYCAKVDYSNYLFFDYWGQGTLVTVSSGGGGSGGGGSGGGGSEIVLTQSPGTLSLSPGEGATLSCRAGQSVRSSYLGWYQQKPGQAPRLLIYGASSRATGIPDRFSGSGSGTDFTLTISRLEPEDFAVYYCQQYGYSPPTFGGGTKLEIKSGGGGSEVQLVESGGGLVQPGGSLKLSCAASGFTFNKYAMNWVRQAPGKGLEWVARIRSKYNNYATYYADSVKDRFTISRDDSKNTAYLQMNNLKTEDTAVYYCVRHGNFGNSYISYWAYWGQGTLVTVSSGGGGSGGGGSGGGGSQTVVTQEPSLTVSPGGTVTLTCGSSTGAVTSGNYPNWVQQKPGQAPRGLIGGTKFLAPGTPARFSGSLLGGKAALTLSGVQPEDEAEYYCVLWYSNRWVFGGGTKLTVLGGGGDKTHTCPPCPAPELLGGPSVFLFPPKPKDTLMISRTPEVTCVVVDVSHEDPEVKFNWYVDGVEVHNAKTKPCEEQYGSTYRCVSVLTVLHQDWLNGKEYKCKVSNKALPAPIEKTISKAKGQPREPQVYTLPPSREEMTKNQVSLTCLVKGFYPSDIAVEWESNGQPENNYKTTPPVLDSDGSFFLYSKLTVDKSRWQQGNVFSCSVMHEALHNHYTQKSLSLSPGGGGSGGGGSGGGGSGGGGSGGGGSGGGGSDKTHTCPPCPAPELLGGPSVFLFPPKPKDTLMISRTPEVTCVVVDVSHEDPEVKFNWYVDGVEVHNAKTKPCEEQYGSTYRCVSVLTVLHQDWLNGKEYKCKVSNKALPAPIEKTISKAKGQPREPQVYTLPPSREEMTKNQVSLTCLVKGFYPSDIAVEWESNGQPENNYKTTPPVLDSDGSFFLYSKLTVDKSRWQQGNVFSCSVMHEALHNHYTQKSLSLSPGK

SEQ ID NO: 1637 - protein, 984 aa, Artificial Sequence
  Synthetic peptide
EVQLLESGGGLVQPGGSLRLSCAASGFTFSSYAMSWVRQAPGKCLEWVSVISGSGGRPNYADSVKGRFTISRDNSKNTLYLQMNSLRDEDTAVYYCAKVDYSNYLFFDYWGQGTLVTVSSGGGGSGGGGSGGGGSEIVLTQSPGTLSLSPGEGATLSCRAGQSVRSSYLGWYQQKPGQAPRLLIYGASSRATGIPDRFSGSGSGTDFTLTISRLEPEDFAVYYCQQYGYSPPTFGCGTKLEIKSGGGGSEVQLVESGGGLVQPGGSLKLSCAASGFTFNKYAMNWVRQAPGKGLEWVARIRSKYNNYATYYADSVKDRFTISRDDSKNTAYLQMNNLKTEDTAVYYCVRHGNFGNSYISYWAYWGQGTLVTVSSGGGGSGGGGSGGGGSQTVVTQEPSLTVSPGGTVTLTCGSSTGAVTSGNYPNWVQQKPGQAPRGLIGGTKFLAPGTPARFSGSLLGGKAALTLSGVQPEDEAEYYCVLWYSNRWVFGGGTKLTVLGGGGDKTHTCPPCPAPELLGGPSVFLFPPKPKDTLMISRTPEVTCVVVDVSHEDPEVKFNWYVDGVEVHNAKTKPCEEQYGSTYRCVSVLTVLHQDWLNGKEYKCKVSNKALPAPIEKTISKAKGQPREPQVYTLPPSREEMTKNQVSLTCLVKGFYPSDIAVEWESNGQPENNYKTTPPVLDSDGSFFLYSKLTVDKSRWQQGNVFSCSVMHEALHNHYTQKSLSLSPGGGGSGGGGSGGGGSGGGGSGGGGSGGGGSDKTHTCPPCPAPELLGGPSVFLFPPKPKDTLMISRTPEVTCVVVDVSHEDPEVKFNWYVDGVEVHNAKTKPCEEQYGSTYRCVSVLTVLHQDWLNGKEYKCKVSNKALPAPIEKTISKAKGQPREPQVYTLPPSREEMTKNQVSLTCLVKGFYPSDIAVEWESNGQPENNYKTTPPVLDSDGSFFLYSKLTVDKSRWQQGNVFSCSVMHEALHNHYTQKSLSLSPGK

SEQ ID NO: 1638 - protein, 984 aa, Artificial Sequence
  Synthetic peptide
EVQLLESGGGLVQPGGSLKLSCAASGFTFSIYAMSWVRQAPGKGLEWVSAISGSGGSTFYADSVKGRFTISRDNSKNTLYLQMNSLRAEDTAVYYCAKHDYSNYPYFDYWGQGTLVTVSSGGGGSGGGGSGGGGSEIVLTQSPGTLSLSPGERATLSCRASQSVRSSYLAWYQQKPGQAPRLLIYGASSRATGIPDRFSGSGSGTDFTLTISRLEPEDFAVYYCQQYGDLPFTFGPGTKLEIKSGGGGSEVQLVESGGGLVQPGGSLKLSCAASGFTFNKYAMNWVRQAPGKGLEWVARIRSKYNNYATYYADSVKDRFTISRDDSKNTAYLQMNNLKTEDTAVYYCVRHGNFGNSYISYWAYWGQGTLVTVSSGGGGSGGGGSGGGGSQTVVTQEPSLTVSPGGTVTLTCGSSTGAVTSGNYPNWVQQKPGQAPRGLIGGTKFLAPGTPARFSGSLLGGKAALTLSGVQPEDEAEYYCVLWYSNRWVFGGGTKLTVLGGGGDKTHTCPPCPAPELLGGPSVFLFPPKPKDTLMISRTPEVTCVVVDVSHEDPEVKFNWYVDGVEVHNAKTKPCEEQYGSTYRCVSVLTVLHQDWLNGKEYKCKVSNKALPAPIEKTISKAKGQPREPQVYTLPPSREEMTKNQVSLTCLVKGFYPSDIAVEWESNGQPENNYKTTPPVLDSDGSFFLYSKLTVDKSRWQQGNVFSCSVMHEALHNHYTQKSLSLSPGGGGSGGGGSGGGGSGGGGSGGGGSGGGGSDKTHTCPPCPAPELLGGPSVFLFPPKPKDTLMISRTPEVTCVVVDVSHEDPEVKFNWYVDGVEVHNAKTKPCEEQYGSTYRCVSVLTVLHQDWLNGKEYKCKVSNKALPAPIEKTISKAKGQPREPQVYTLPPSREEMTKNQVSLTCLVKGFYPSDIAVEWESNGQPENNYKTTPPVLDSDGSFFLYSKLTVDKSRWQQGNVFSCSVMHEALHNHYTQKSLSLSPGK

SEQ ID NO: 1639 - protein, 984 aa, Artificial Sequence
  Synthetic peptide
EVQLLESGGGLVQPGGSLKLSCAASGFTFSIYAMSWVRQAPGKCLEWVSAISGSGGSTFYADSVKGRFTISRDNSKNTLYLQMNSLRAEDTAVYYCAKHDYSNYPYFDYWGQGTLVTVSSGGGGSGGGGSGGGGSEIVLTQSPGTLSLSPGERATLSCRASQSVRSSYLAWYQQKPGQAPRLLIYGASSRATGIPDRFSGSGSGTDFTLTISRLEPEDFAVYYCQQYGDLPFTFGCGTKLEIKSGGGGSEVQLVESGGGLVQPGGSLKLSCAASGFTFNKYAMNWVRQAPGKGLEWVARIRSKYNNYATYYADSVKDRFTISRDDSKNTAYLQMNNLKTEDTAVYYCVRHGNFGNSYISYWAYWGQGTLVTVSSGGGGSGGGGSGGGGSQTVVTQEPSLTVSPGGTVTLTCGSSTGAVTSGNYPNWVQQKPGQAPRGLIGGTKFLAPGTPARFSGSLLGGKAALTLSGVQPEDEAEYYCVLWYSNRWVFGGGTKLTVLGGGGDKTHTCPPCPAPELLGGPSVFLFPPKPKDTLMISRTPEVTCVVVDVSHEDPEVKFNWYVDGVEVHNAKTKPCEEQYGSTYRCVSVLTVLHQDWLNGKEYKCKVSNKALPAPIEKTISKAKGQPREPQVYTLPPSREEMTKNQVSLTCLVKGFYPSDIAVEWESNGQPENNYKTTPPVLDSDGSFFLYSKLTVDKSRWQQGNVFSCSVMHEALHNHYTQKSLSLSPGGGGSGGGGSGGGGSGGGGSGGGGSGGGGSDKTHTCPPCPAPELLGGPSVFLFPPKPKDTLMISRTPEVTCVVVDVSHEDPEVKFNWYVDGVEVHNAKTKPCEEQYGSTYRCVSVLTVLHQDWLNGKEYKCKVSNKALPAPIEKTISKAKGQPREPQVYTLPPSREEMTKNQVSLTCLVKGFYPSDIAVEWESNGQPENNYKTTPPVLDSDGSFFLYSKLTVDKSRWQQGNVFSCSVMHEALHNHYTQKSLSLSPGK

SEQ ID NO: 1640 - protein, 984 aa, Artificial Sequence
  Synthetic peptide
EVQLLESGGGMVQPGGSLRLSCAASGFTFSSYAMSWVRQAPGKGLEWVSAISGSGGRTFYADSVEGRFTISRDNSKNTLFLQMNSLRAEDTAVYYCAKHDYSNYPYFDYWGQGTLVTVSSGGGGSGGGGSGGGGSEIVLTQSPGTLSLSPGERATLSCRASQSVRSSYLAWYQQKPGQAPRLLIYGASSRATGIPDRFSGSGSGTDFTLTISRLEPEDFAVYYCQQYGSSPFTFGPGTKLEIKSGGGGSEVQLVESGGGLVQPGGSLKLSCAASGFTFNKYAMNWVRQAPGKGLEWVARIRSKYNNYATYYADSVKDRFTISRDDSKNTAYLQMNNLKTEDTAVYYCVRHGNFGNSYISYWAYWGQGTLVTVSSGGGGSGGGGSGGGGSQTVVTQEPSLTVSPGGTVTLTCGSSTGAVTSGNYPNWVQQKPGQAPRGLIGGTKFLAPGTPARFSGSLLGGKAALTLSGVQPEDEAEYYCVLWYSNRWVFGGGTKLTVLGGGGDKTHTCPPCPAPELLGGPSVFLFPPKPKDTLMISRTPEVTCVVVDVSHEDPEVKFNWYVDGVEVHNAKTKPCEEQYGSTYRCVSVLTVLHQDWLNGKEYKCKVSNKALPAPIEKTISKAKGQPREPQVYTLPPSREEMTKNQVSLTCLVKGFYPSDIAVEWESNGQPENNYKTTPPVLDSDGSFFLYSKLTVDKSRWQQGNVFSCSVMHEALHNHYTQKSLSLSPGGGGSGGGGSGGGGSGGGGSGGGGSGGGGSDKTHTCPPCPAPELLGGPSVFLFPPKPKDTLMISRTPEVTCVVVDVSHEDPEVKFNWYVDGVEVHNAKTKPCEEQYGSTYRCVSVLTVLHQDWLNGKEYKCKVSNKALPAPIEKTISKAKGQPREPQVYTLPPSREEMTKNQVSLTCLVKGFYPSDIAVEWESNGQPENNYKTTPPVLDSDGSFFLYSKLTVDKSRWQQGNVFSCSVMHEALHNHYTQKSLSLSPGK

SEQ ID NO: 1641 - protein, 984 aa, Artificial Sequence
  Synthetic peptide
EVQLLESGGGMVQPGGSLRLSCAASGFTFSSYAMSWVRQAPGKCLEWVSAISGSGGRTFYADSVEGRFTISRDNSKNTLFLQMNSLRAEDTAVYYCAKHDYSNYPYFDYWGQGTLVTVSSGGGGSGGGGSGGGGSEIVLTQSPGTLSLSPGERATLSCRASQSVRSSYLAWYQQKPGQAPRLLIYGASSRATGIPDRFSGSGSGTDFTLTISRLEPEDFAVYYCQQYGSSPFTFGCGTKLEIKSGGGGSEVQLVESGGGLVQPGGSLKLSCAASGFTFNKYAMNWVRQAPGKGLEWVARIRSKYNNYATYYADSVKDRFTISRDDSKNTAYLQMNNLKTEDTAVYYCVRHGNFGNSYISYWAYWGQGTLVTVSSGGGGSGGGGSGGGGSQTVVTQEPSLTVSPGGTVTLTCGSSTGAVTSGNYPNWVQQKPGQAPRGLIGGTKFLAPGTPARFSGSLLGGKAALTLSGVQPEDEAEYYCVLWYSNRWVFGGGTKLTVLGGGGDKTHTCPPCPAPELLGGPSVFLFPPKPKDTLMISRTPEVTCVVVDVSHEDPEVKFNWYVDGVEVHNAKTKPCEEQYGSTYRCVSVLTVLHQDWLNGKEYKCKVSNKALPAPIEKTISKAKGQPREPQVYTLPPSREEMTKNQVSLTCLVKGFYPSDIAVEWESNGQPENNYKTTPPVLDSDGSFFLYSKLTVDKSRWQQGNVFSCSVMHEALHNHYTQKSLSLSPGGGGSGGGGSGGGGSGGGGSGGGGSGGGGSDKTHTCPPCPAPELLGGPSVFLFPPKPKDTLMISRTPEVTCVVVDVSHEDPEVKFNWYVDGVEVHNAKTKPCEEQYGSTYRCVSVLTVLHQDWLNGKEYKCKVSNKALPAPIEKTISKAKGQPREPQVYTLPPSREEMTKNQVSLTCLVKGFYPSDIAVEWESNGQPENNYKTTPPVLDSDGSFFLYSKLTVDKSRWQQGNVFSCSVMHEALHNHYTQKSLSLSPGK

SEQ ID NO: 1642 - protein, 984 aa, Artificial Sequence
  Synthetic peptide
EVQLLESGGGMVQPGGSLRLSCAASGFTFSSYAMSWVRQAPGKGLEWVSAISGSGGRTFYADSVEGRFTISRDNSKNTLYLQMNSLRAEDTAVYYCAKHDYSNYPYFDYWGQGTLVTVSSGGGGSGGGGSGGGGSEIVLTQSPGTLSLSPGERATLSCRASQSIRSSYLAWYQQKPGQAPRLLIYGASSRATGIPDRFSGSGSGTDFTLTISRLEPEDFAVYYCQQYGDLPFTFGPGTKLEIKSGGGGSEVQLVESGGGLVQPGGSLKLSCAASGFTFNKYAMNWVRQAPGKGLEWVARIRSKYNNYATYYADSVKDRFTISRDDSKNTAYLQMNNLKTEDTAVYYCVRHGNFGNSYISYWAYWGQGTLVTVSSGGGGSGGGGSGGGGSQTVVTQEPSLTVSPGGTVTLTCGSSTGAVTSGNYPNWVQQKPGQAPRGLIGGTKFLAPGTPARFSGSLLGGKAALTLSGVQPEDEAEYYCVLWYSNRWVFGGGTKLTVLGGGGDKTHTCPPCPAPELLGGPSVFLFPPKPKDTLMISRTPEVTCVVVDVSHEDPEVKFNWYVDGVEVHNAKTKPCEEQYGSTYRCVSVLTVLHQDWLNGKEYKCKVSNKALPAPIEKTISKAKGQPREPQVYTLPPSREEMTKNQVSLTCLVKGFYPSDIAVEWESNGQPENNYKTTPPVLDSDGSFFLYSKLTVDKSRWQQGNVFSCSVMHEALHNHYTQKSLSLSPGGGGSGGGGSGGGGSGGGGSGGGGSGGGGSDKTHTCPPCPAPELLGGPSVFLFPPKPKDTLMISRTPEVTCVVVDVSHEDPEVKFNWYVDGVEVHNAKTKPCEEQYGSTYRCVSVLTVLHQDWLNGKEYKCKVSNKALPAPIEKTISKAKGQPREPQVYTLPPSREEMTKNQVSLTCLVKGFYPSDIAVEWESNGQPENNYKTTPPVLDSDGSFFLYSKLTVDKSRWQQGNVFSCSVMHEALHNHYTQKSLSLSPGK

SEQ ID NO: 1643 - protein, 984 aa, Artificial Sequence; identical to SEQ ID NO: 1642
  Synthetic peptide

SEQ ID NO: 1644 - protein, 984 aa, Artificial Sequence
  Synthetic peptide
EVQLLESGGGLVQSGGSLRLSCAASGFTFSSYAMSWVRQAPGKGLEWVSAISGSGGRTHYADSVKGRFTISRDNSKNTLYLQMNSLRAEDTAVYYCAKHDYSNYPYFDYWGQGTLVTVSSGGGGSGGGGSGGGGSEIVLTQSPGTLSLSPGERATLSCRASQSVRSSYLAWYQQKPGQAPRLLIYGASSRATGIPDRFSGSGSGTDFTLTISRLEPEDFAVYYCQQYGSSPFTFGPGTKLEIKSGGGGSEVQLVESGGGLVQPGGSLKLSCAASGFTFNKYAMNWVRQAPGKGLEWVARIRSKYNNYATYYADSVKDRFTISRDDSKNTAYLQMNNLKTEDTAVYYCVRHGNFGNSYISYWAYWGQGTLVTVSSGGGGSGGGGSGGGGSQTVVTQEPSLTVSPGGTVTLTCGSSTGAVTSGNYPNWVQQKPGQAPRGLIGGTKFLAPGTPARFSGSLLGGKAALTLSGVQPEDEAEYYCVLWYSNRWVFGGGTKLTVLGGGGDKTHTCPPCPAPELLGGPSVFLFPPKPKDTLMISRTPEVTCVVVDVSHEDPEVKFNWYVDGVEVHNAKTKPCEEQYGSTYRCVSVLTVLHQDWLNGKEYKCKVSNKALPAPIEKTISKAKGQPREPQVYTLPPSREEMTKNQVSLTCLVKGFYPSDIAVEWESNGQPENNYKTTPPVLDSDGSFFLYSKLTVDKSRWQQGNVFSCSVMHEALHNHYTQKSLSLSPGGGGSGGGGSGGGGSGGGGSGGGGSGGGGSDKTHTCPPCPAPELLGGPSVFLFPPKPKDTLMISRTPEVTCVVVDVSHEDPEVKFNWYVDGVEVHNAKTKPCEEQYGSTYRCVSVLTVLHQDWLNGKEYKCKVSNKALPAPIEKTISKAKGQPREPQVYTLPPSREEMTKNQVSLTCLVKGFYPSDIAVEWESNGQPENNYKTTPPVLDSDGSFFLYSKLTVDKSRWQQGNVFSCSVMHEALHNHYTQKSLSLSPGK

SEQ ID NO: 1645 - protein, 984 aa, Artificial Sequence
  Synthetic peptide
EVQLLESGGGLVQSGGSLRLSCAASGFTFSSYAMSWVRQAPGKCLEWVSAISGSGGRTHYADSVKGRFTISRDNSKNTLYLQMNSLRAEDTAVYYCAKHDYSNYPYFDYWGQGTLVTVSSGGGGSGGGGSGGGGSEIVLTQSPGTLSLSPGERATLSCRASQSVRSSYLAWYQQKPGQAPRLLIYGASSRATGIPDRFSGSGSGTDFTLTISRLEPEDFAVYYCQQYGSSPFTFGCGTKLEIKSGGGGSEVQLVESGGGLVQPGGSLKLSCAASGFTFNKYAMNWVRQAPGKGLEWVARIRSKYNNYATYYADSVKDRFTISRDDSKNTAYLQMNNLKTEDTAVYYCVRHGNFGNSYISYWAYWGQGTLVTVSSGGGGSGGGGSGGGGSQTVVTQEPSLTVSPGGTVTLTCGSSTGAVTSGNYPNWVQQKPGQAPRGLIGGTKFLAPGTPARFSGSLLGGKAALTLSGVQPEDEAEYYCVLWYSNRWVFGGGTKLTVLGGGGDKTHTCPPCPAPELLGGPSVFLFPPKPKDTLMISRTPEVTCVVVDVSHEDPEVKFNWYVDGVEVHNAKTKPCEEQYGSTYRCVSVLTVLHQDWLNGKEYKCKVSNKALPAPIEKTISKAKGQPREPQVYTLPPSREEMTKNQVSLTCLVKGFYPSDIAVEWESNGQPENNYKTTPPVLDSDGSFFLYSKLTVDKSRWQQGNVFSCSVMHEALHNHYTQKSLSLSPGGGGSGGGGSGGGGSGGGGSGGGGSGGGGSDKTHTCPPCPAPELLGGPSVFLFPPKPKDTLMISRTPEVTCVVVDVSHEDPEVKFNWYVDGVEVHNAKTKPCEEQYGSTYRCVSVLTVLHQDWLNGKEYKCKVSNKALPAPIEKTISKAKGQPREPQVYTLPPSREEMTKNQVSLTCLVKGFYPSDIAVEWESNGQPENNYKTTPPVLDSDGSFFLYSKLTVDKSRWQQGNVFSCSVMHEALHNHYTQKSLSLSPGK

SEQ ID NO: 1646 - protein, 984 aa, Artificial Sequence
  Synthetic peptide
EVQLLESGGGLVQPGGSLRLSCAASGFTFSSYAMSWVRQAPGKGLEWVSLISGSGGRTHYADSVKGRFTISRDNSKNTLYLQMNSLRAEDTAVYYCAKHDYSNYPYFDYWGQGTLVTVSSGGGGSGGGGSGGGGSEIVLTQSPGTLSLSPGERATLSCRASQSVRSTYLAWYQQKPGQAPRLLIYDASSRATGIPDRFSGSGSGTDFTLTISRLEPEDFAVYFCQQYGSSPPTFGGGTKLEIKSGGGGSEVQLVESGGGLVQPGGSLKLSCAASGFTFNKYAMNWVRQAPGKGLEWVARIRSKYNNYATYYADSVKDRFTISRDDSKNTAYLQMNNLKTEDTAVYYCVRHGNFGNSYISYWAYWGQGTLVTVSSGGGGSGGGGSGGGGSQTVVTQEPSLTVSPGGTVTLTCGSSTGAVTSGNYPNWVQQKPGQAPRGLIGGTKFLAPGTPARFSGSLLGGKAALTLSGVQPEDEAEYYCVLWYSNRWVFGGGTKLTVLGGGGDKTHTCPPCPAPELLGGPSVFLFPPKPKDTLMISRTPEVTCVVVDVSHEDPEVKFNWYVDGVEVHNAKTKPCEEQYGSTYRCVSVLTVLHQDWLNGKEYKCKVSNKALPAPIEKTISKAKGQPREPQVYTLPPSREEMTKNQVSLTCLVKGFYPSDIAVEWESNGQPENNYKTTPPVLDSDGSFFLYSKLTVDKSRWQQGNVFSCSVMHEALHNHYTQKSLSLSPGGGGSGGGGSGGGGSGGGGSGGGGSGGGGSDKTHTCPPCPAPELLGGPSVFLFPPKPKDTLMISRTPEVTCVVVDVSHEDPEVKFNWYVDGVEVHNAKTKPCEEQYGSTYRCVSVLTVLHQDWLNGKEYKCKVSNKALPAPIEKTISKAKGQPREPQVYTLPPSREEMTKNQVSLTCLVKGFYPSDIAVEWESNGQPENNYKTTPPVLDSDGSFFLYSKLTVDKSRWQQGNVFSCSVMHEALHNHYTQKSLSLSPGK

SEQ ID NO: 1647 - protein, 984 aa, Artificial Sequence
  Synthetic peptide
EVQLLESGGGLVQPGGSLRLSCAASGFTFSSYAMSWVRQAPGKCLEWVSLISGSGGRTHYADSVKGRFTISRDNSKNTLYLQMNSLRAEDTAVYYCAKHDYSNYPYFDYWGQGTLVTVSSGGGGSGGGGSGGGGSEIVLTQSPGTLSLSPGERATLSCRASQSVRSTYLAWYQQKPGQAPRLLIYDASSRATGIPDRFSGSGSGTDFTLTISRLEPEDFAVYFCQQYGSSPPTFGCGTKLEIKSGGGGSEVQLVESGGGLVQPGGSLKLSCAASGFTFNKYAMNWVRQAPGKGLEWVARIRSKYNNYATYYADSVKDRFTISRDDSKNTAYLQMNNLKTEDTAVYYCVRHGNFGNSYISYWAYWGQGTLVTVSSGGGGSGGGGSGGGGSQTVVTQEPSLTVSPGGTVTLTCGSSTGAVTSGNYPNWVQQKPGQAPRGLIGGTKFLAPGTPARFSGSLLGGKAALTLSGVQPEDEAEYYCVLWYSNRWVFGGGTKLTVLGGGGDKTHTCPPCPAPELLGGPSVFLFPPKPKDTLMISRTPEVTCVVVDVSHEDPEVKFNWYVDGVEVHNAKTKPCEEQYGSTYRCVSVLTVLHQDWLNGKEYKCKVSNKALPAPIEKTISKAKGQPREPQVYTLPPSREEMTKNQVSLTCLVKGFYPSDIAVEWESNGQPENNYKTTPPVLDSDGSFFLYSKLTVDKSRWQQGNVFSCSVMHEALHNHYTQKSLSLSPGGGGSGGGGSGGGGSGGGGSGGGGSGGGGSDKTHTCPPCPAPELLGGPSVFLFPPKPKDTLMISRTPEVTCVVVDVSHEDPEVKFNWYVDGVEVHNAKTKPCEEQYGSTYRCVSVLTVLHQDWLNGKEYKCKVSNKALPAPIEKTISKAKGQPREPQVYTLPPSREEMTKNQVSLTCLVKGFYPSDIAVEWESNGQPENNYKTTPPVLDSDGSFFLYSKLTVDKSRWQQGNVFSCSVMHEALHNHYTQKSLSLSPGK

SEQ ID NO: 1648 - protein, 984 aa, Artificial Sequence
  Synthetic peptide
EVQLLESGGGLVQPGGSLRLSCAASGFTFSTYAMSWVRQAPGKGLEWVSAISGSGGSTFYADSVKGRFTISRDNSKNTLSLQMNSLRAEDTAVYYCAKHDYSNYPYFDYWGQGTLVTVSSGGGGSGGGGSGGGGSEIVLTQSPGTLSLSPGERATLSCRASQSVRSSYLAWYQQKPGQAPRLLIYGASSRATGIPDRFSGSGSGTDFTLTISRLEPEDFAVYYCQQYGDLPFTFGPGTKLEIKSGGGGSEVQLVESGGGLVQPGGSLKLSCAASGFTFNKYAMNWVRQAPGKGLEWVARIRSKYNNYATYYADSVKDRFTISRDDSKNTAYLQMNNLKTEDTAVYYCVRHGNFGNSYISYWAYWGQGTLVTVSSGGGGSGGGGSGGGGSQTVVTQEPSLTVSPGGTVTLTCGSSTGAVTSGNYPNWVQQKPGQAPRGLIGGTKFLAPGTPARFSGSLLGGKAALTLSGVQPEDEAEYYCVLWYSNRWVFGGGTKLTVLGGGGDKTHTCPPCPAPELLGGPSVFLFPPKPKDTLMISRTPEVTCVVVDVSHEDPEVKFNWYVDGVEVHNAKTKPCEEQYGSTYRCVSVLTVLHQDWLNGKEYKCKVSNKALPAPIEKTISKAKGQPREPQVYTLPPSREEMTKNQVSLTCLVKGFYPSDIAVEWESNGQPENNYKTTPPVLDSDGSFFLYSKLTVDKSRWQQGNVFSCSVMHEALHNHYTQKSLSLSPGGGGSGGGGSGGGGSGGGGSGGGGSGGGGSDKTHTCPPCPAPELLGGPSVFLFPPKPKDTLMISRTPEVTCVVVDVSHEDPEVKFNWYVDGVEVHNAKTKPCEEQYGSTYRCVSVLTVLHQDWLNGKEYKCKVSNKALPAPIEKTISKAKGQPREPQVYTLPPSREEMTKNQVSLTCLVKGFYPSDIAVEWESNGQPENNYKTTPPVLDSDGSFFLYSKLTVDKSRWQQGNVFSCSVMHEALHNHYTQKSLSLSPGK

SEQ ID NO: 1649 - protein, 984 aa, Artificial Sequence
  Synthetic peptide
EVQLLESGGGLVQPGGSLRLSCAASGFTFSTYAMSWVRQAPGKCLEWVSAISGSGGSTFYADSVKGRFTISRDNSKNTLSLQMNSLRAEDTAVYYCAKHDYSNYPYFDYWGQGTLVTVSSGGGGSGGGGSGGGGSEIVLTQSPGTLSLSPGERATLSCRASQSVRSSYLAWYQQKPGQAPRLLIYGASSRATGIPDRFSGSGSGTDFTLTISRLEPEDFAVYYCQQYGDLPFTFGCGTKLEIKSGGGGSEVQLVESGGGLVQPGGSLKLSCAASGFTFNKYAMNWVRQAPGKGLEWVARIRSKYNNYATYYADSVKDRFTISRDDSKNTAYLQMNNLKTEDTAVYYCVRHGNFGNSYISYWAYWGQGTLVTVSSGGGGSGGGGSGGGGSQTVVTQEPSLTVSPGGTVTLTCGSSTGAVTSGNYPNWVQQKPGQAPRGLIGGTKFLAPGTPARFSGSLLGGKAALTLSGVQPEDEAEYYCVLWYSNRWVFGGGTKLTVLGGGGDKTHTCPPCPAPELLGGPSVFLFPPKPKDTLMISRTPEVTCVVVDVSHEDPEVKFNWYVDGVEVHNAKTKPCEEQYGSTYRCVSVLTVLHQDWLNGKEYKCKVSNKALPAPIEKTISKAKGQPREPQVYTLPPSREEMTKNQVSLTCLVKGFYPSDIAVEWESNGQPENNYKTTPPVLDSDGSFFLYSKLTVDKSRWQQGNVFSCSVMHEALHNHYTQKSLSLSPGGGGSGGGGSGGGGSGGGGSGGGGSGGGGSDKTHTCPPCPAPELLGGPSVFLFPPKPKDTLMISRTPEVTCVVVDVSHEDPEVKFNWYVDGVEVHNAKTKPCEEQYGSTYRCVSVLTVLHQDWLNGKEYKCKVSNKALPAPIEKTISKAKGQPREPQVYTLPPSREEMTKNQVSLTCLVKGFYPSDIAVEWESNGQPENNYKTTPPVLDSDGSFFLYSKLTVDKSRWQQGNVFSCSVMHEALHNHYTQKSLSLSPGK

SEQ ID NO: 1650 - protein, 984 aa, Artificial Sequence
  Synthetic peptide
EVQLLESGGGMVQPGGSLRLSCAASGFTFSTYAMSWVRQAPGKGLEWVSAISGSGGRTFYADSVEGRFTISRDNSKNTLYLQMNSLRAEDTAVYYCAKHDYSNYPYFDYWGQGTLVTVSSGGGGSGGGGSGGGGSEIVLTQSPGTLSLSPGERATLSCRASQSVRSTYLAWYQQKPGQAPRLLIYGASSRATGIPDRFSGSGSGTDFTLTISRLEPEDFAVYSCQQYGDLPFTFGPGTKLEIKSGGGGSEVQLVESGGGLVQPGGSLKLSCAASGFTFNKYAMNWVRQAPGKGLEWVARIRSKYNNYATYYADSVKDRFTISRDDSKNTAYLQMNNLKTEDTAVYYCVRHGNFGNSYISYWAYWGQGTLVTVSSGGGGSGGGGSGGGGSQTVVTQEPSLTVSPGGTVTLTCGSSTGAVTSGNYPNWVQQKPGQAPRGLIGGTKFLAPGTPARFSGSLLGGKAALTLSGVQPEDEAEYYCVLWYSNRWVFGGGTKLTVLGGGGDKTHTCPPCPAPELLGGPSVFLFPPKPKDTLMISRTPEVTCVVVDVSHEDPEVKFNWYVDGVEVHNAKTKPCEEQYGSTYRCVSVLTVLHQDWLNGKEYKCKVSNKALPAPIEKTISKAKGQPREPQVYTLPPSREEMTKNQVSLTCLVKGFYPSDIAVEWESNGQPENNYKTTPPVLDSDGSFFLYSKLTVDKSRWQQGNVFSCSVMHEALHNHYTQKSLSLSPGGGGSGGGGSGGGGSGGGGSGGGGSGGGGSDKTHTCPPCPAPELLGGPSVFLFPPKPKDTLMISRTPEVTCVVVDVSHEDPEVKFNWYVDGVEVHNAKTKPCEEQYGSTYRCVSVLTVLHQDWLNGKEYKCKVSNKALPAPIEKTISKAKGQPREPQVYTLPPSREEMTKNQVSLTCLVKGFYPSDIAVEWESNGQPENNYKTTPPVLDSDGSFFLYSKLTVDKSRWQQGNVFSCSVMHEALHNHYTQKSLSLSPGK

SEQ ID NO: 1651 - protein, 984 aa, Artificial Sequence
  Synthetic peptide
EVQLLESGGGMVQPGGSLRLSCAASGFTFSTYAMSWVRQAPGKCLEWVSAISGSGGRTFYADSVEGRFTISRDNSKNTLYLQMNSLRAEDTAVYYCAKHDYSNYPYFDYWGQGTLVTVSSGGGGSGGGGSGGGGSEIVLTQSPGTLSLSPGERATLSCRASQSVRSTYLAWYQQKPGQAPRLLIYGASSRATGIPDRFSGSGSGTDFTLTISRLEPEDFAVYSCQQYGDLPFTFGCGTKLEIKSGGGGSEVQLVESGGGLVQPGGSLKLSCAASGFTFNKYAMNWVRQAPGKGLEWVARIRSKYNNYATYYADSVKDRFTISRDDSKNTAYLQMNNLKTEDTAVYYCVRHGNFGNSYISYWAYWGQGTLVTVSSGGGGSGGGGSGGGGSQTVVTQEPSLTVSPGGTVTLTCGSSTGAVTSGNYPNWVQQKPGQAPRGLIGGTKFLAPGTPARFSGSLLGGKAALTLSGVQPEDEAEYYCVLWYSNRWVFGGGTKLTVLGGGGDKTHTCPPCPAPELLGGPSVFLFPPKPKDTLMISRTPEVTCVVVDVSHEDPEVKFNWYVDGVEVHNAKTKPCEEQYGSTYRCVSVLTVLHQDWLNGKEYKCKVSNKALPAPIEKTISKAKGQPREPQVYTLPPSREEMTKNQVSLTCLVKGFYPSDIAVEWESNGQPENNYKTTPPVLDSDGSFFLYSKLTVDKSRWQQGNVFSCSVMHEALHNHYTQKSLSLSPGGGGSGGGGSGGGGSGGGGSGGGGSGGGGSDKTHTCPPCPAPELLGGPSVFLFPPKPKDTLMISRTPEVTCVVVDVSHEDPEVKFNWYVDGVEVHNAKTKPCEEQYGSTYRCVSVLTVLHQDWLNGKEYKCKVSNKALPAPIEKTISKAKGQPREPQVYTLPPSREEMTKNQVSLTCLVKGFYPSDIAVEWESNGQPENNYKTTPPVLDSDGSFFLYSKLTVDKSRWQQGNVFSCSVMHEALHNHYTQKSLSLSPGK

SEQ ID NO: 1652 - protein, 984 aa, Artificial Sequence
  Synthetic peptide
EVQLLESGGGLVQPGGSLRLSCAASGFTFSSYAMSWVRQAPGKGLEWVSAISGSGGYTYYADSVKGRFTISRDNSKNTLYLQMNSLRAEDTAVYYCAKHDYSNYPYFDYWGQGTLVTVSSGGGGSGGGGSGGGGSEIVLTQSPGTLSLSPGERATLSCRASQSVRSNYLAWYQQKPGQAPRLLIYGASSRATGIPDRFSGSGSGTDFTLTISRLEPEDFAVYYCQQYGDLPFTFGPGTKVEIKSGGGGSEVQLVESGGGLVQPGGSLKLSCAASGFTFNKYAMNWVRQAPGKGLEWVARIRSKYNNYATYYADSVKDRFTISRDDSKNTAYLQMNNLKTEDTAVYYCVRHGNFGNSYISYWAYWGQGTLVTVSSGGGGSGGGGSGGGGSQTVVTQEPSLTVSPGGTVTLTCGSSTGAVTSGNYPNWVQQKPGQAPRGLIGGTKFLAPGTPARFSGSLLGGKAALTLSGVQPEDEAEYYCVLWYSNRWVFGGGTKLTVLGGGGDKTHTCPPCPAPELLGGPSVFLFPPKPKDTLMISRTPEVTCVVVDVSHEDPEVKFNWYVDGVEVHNAKTKPCEEQYGSTYRCVSVLTVLHQDWLNGKEYKCKVSNKALPAPIEKTISKAKGQPREPQVYTLPPSREEMTKNQVSLTCLVKGFYPSDIAVEWESNGQPENNYKTTPPVLDSDGSFFLYSKLTVDKSRWQQGNVFSCSVMHEALHNHYTQKSLSLSPGGGGSGGGGSGGGGSGGGGSGGGGSGGGGSDKTHTCPPCPAPELLGGPSVFLFPPKPKDTLMISRTPEVTCVVVDVSHEDPEVKFNWYVDGVEVHNAKTKPCEEQYGSTYRCVSVLTVLHQDWLNGKEYKCKVSNKALPAPIEKTISKAKGQPREPQVYTLPPSREEMTKNQVSLTCLVKGFYPSDIAVEWESNGQPENNYKTTPPVLDSDGSFFLYSKLTVDKSRWQQGNVFSCSVMHEALHNHYTQKSLSLSPGK

SEQ ID NO: 1653 - protein, 984 aa, Artificial Sequence
  Synthetic peptide
EVQLLESGGGLVQPGGSLRLSCAASGFTFSSYAMSWVRQAPGKCLEWVSAISGSGGYTYYADSVKGRFTISRDNSKNTLYLQMNSLRAEDTAVYYCAKHDYSNYPYFDYWGQGTLVTVSSGGGGSGGGGSGGGGSEIVLTQSPGTLSLSPGERATLSCRASQSVRSNYLAWYQQKPGQAPRLLIYGASSRATGIPDRFSGSGSGTDFTLTISRLEPEDFAVYYCQQYGDLPFTFGCGTKVEIKSGGGGSEVQLVESGGGLVQPGGSLKLSCAASGFTFNKYAMNWVRQAPGKGLEWVARIRSKYNNYATYYADSVKDRFTISRDDSKNTAYLQMNNLKTEDTAVYYCVRHGNFGNSYISYWAYWGQGTLVTVSSGGGGSGGGGSGGGGSQTVVTQEPSLTVSPGGTVTLTCGSSTGAVTSGNYPNWVQQKPGQAPRGLIGGTKFLAPGTPARFSGSLLGGKAALTLSGVQPEDEAEYYCVLWYSNRWVFGGGTKLTVLGGGGDKTHTCPPCPAPELLGGPSVFLFPPKPKDTLMISRTPEVTCVVVDVSHEDPEVKFNWYVDGVEVHNAKTKPCEEQYGSTYRCVSVLTVLHQDWLNGKEYKCKVSNKALPAPIEKTISKAKGQPREPQVYTLPPSREEMTKNQVSLTCLVKGFYPSDIAVEWESNGQPENNYKTTPPVLDSDGSFFLYSKLTVDKSRWQQGNVFSCSVMHEALHNHYTQKSLSLSPGGGGSGGGGSGGGGSGGGGSGGGGSGGGGSDKTHTCPPCPAPELLGGPSVFLFPPKPKDTLMISRTPEVTCVVVDVSHEDPEVKFNWYVDGVEVHNAKTKPCEEQYGSTYRCVSVLTVLHQDWLNGKEYKCKVSNKALPAPIEKTISKAKGQPREPQVYTLPPSREEMTKNQVSLTCLVKGFYPSDIAVEWESNGQPENNYKTTPPVLDSDGSFFLYSKLTVDKSRWQQGNVFSCSVMHEALHNHYTQKSLSLSPGK

SEQ ID NO: 1654 - protein, 984 aa, Artificial Sequence
  Synthetic peptide
EVQLLESGGGLAQPGGSLRLSCAASGFTFSSYAMSWVRQAPGKGLEWVSAISGSGGSTFYADSVKGRFTISRDNSKNTLYLQMNSLRAEDTAVYFCAKHDYSNYPYFDYWGQGTLVTVSSGGGGSGGGGSGGGGSEIVLTQSPGTLSLSPGERATLSCRASQSVRSSYLAWYQQKPGQAPRLLIYGASSRATGIPDRFSGSGSGTDFTLTISRLEPEDFAVYYCQQYGDLPFTFGPGTKVEIKSGGGGSEVQLVESGGGLVQPGGSLKLSCAASGFTFNKYAMNWVRQAPGKGLEWVARIRSKYNNYATYYADSVKDRFTISRDDSKNTAYLQMNNLKTEDTAVYYCVRHGNFGNSYISYWAYWGQGTLVTVSSGGGGSGGGGSGGGGSQTVVTQEPSLTVSPGGTVTLTCGSSTGAVTSGNYPNWVQQKPGQAPRGLIGGTKFLAPGTPARFSGSLLGGKAALTLSGVQPEDEAEYYCVLWYSNRWVFGGGTKLTVLGGGGDKTHTCPPCPAPELLGGPSVFLFPPKPKDTLMISRTPEVTCVVVDVSHEDPEVKFNWYVDGVEVHNAKTKPCEEQYGSTYRCVSVLTVLHQDWLNGKEYKCKVSNKALPAPIEKTISKAKGQPREPQVYTLPPSREEMTKNQVSLTCLVKGFYPSDIAVEWESNGQPENNYKTTPPVLDSDGSFFLYSKLTVDKSRWQQGNVFSCSVMHEALHNHYTQKSLSLSPGGGGSGGGGSGGGGSGGGGSGGGGSGGGGSDKTHTCPPCPAPELLGGPSVFLFPPKPKDTLMISRTPEVTCVVVDVSHEDPEVKFNWYVDGVEVHNAKTKPCEEQYGSTYRCVSVLTVLHQDWLNGKEYKCKVSNKALPAPIEKTISKAKGQPREPQVYTLPPSREEMTKNQVSLTCLVKGFYPSDIAVEWESNGQPENNYKTTPPVLDSDGSFFLYSKLTVDKSRWQQGNVFSCSVMHEALHNHYTQKSLSLSPGK

SEQ ID NO: 1655 - protein, 984 aa, Artificial Sequence
  Synthetic peptide
EVQLLESGGGLAQPGGSLRLSCAASGFTFSSYAMSWVRQAPGKCLEWVSAISGSGGSTFYADSVKGRFTISRDNSKNTLYLQMNSLRAEDTAVYFCAKHDYSNYPYFDYWGQGTLVTVSSGGGGSGGGGSGGGGSEIVLTQSPGTLSLSPGERATLSCRASQSVRSSYLAWYQQKPGQAPRLLIYGASSRATGIPDRFSGSGSGTDFTLTISRLEPEDFAVYYCQQYGDLPFTFGCGTKVEIKSGGGGSEVQLVESGGGLVQPGGSLKLSCAASGFTFNKYAMNWVRQAPGKGLEWVARIRSKYNNYATYYADSVKDRFTISRDDSKNTAYLQMNNLKTEDTAVYYCVRHGNFGNSYISYWAYWGQGTLVTVSSGGGGSGGGGSGGGGSQTVVTQEPSLTVSPGGTVTLTCGSSTGAVTSGNYPNWVQQKPGQAPRGLIGGTKFLAPGTPARFSGSLLGGKAALTLSGVQPEDEAEYYCVLWYSNRWVFGGGTKLTVLGGGGDKTHTCPPCPAPELLGGPSVFLFPPKPKDTLMISRTPEVTCVVVDVSHEDPEVKFNWYVDGVEVHNAKTKPCEEQYGSTYRCVSVLTVLHQDWLNGKEYKCKVSNKALPAPIEKTISKAKGQPREPQVYTLPPSREEMTKNQVSLTCLVKGFYPSDIAVEWESNGQPENNYKTTPPVLDSDGSFFLYSKLTVDKSRWQQGNVFSCSVMHEALHNHYTQKSLSLSPGGGGSGGGGSGGGGSGGGGSGGGGSGGGGSDKTHTCPPCPAPELLGGPSVFLFPPKPKDTLMISRTPEVTCVVVDVSHEDPEVKFNWYVDGVEVHNAKTKPCEEQYGSTYRCVSVLTVLHQDWLNGKEYKCKVSNKALPAPIEKTISKAKGQPREPQVYTLPPSREEMTKNQVSLTCLVKGFYPSDIAVEWESNGQPENNYKTTPPVLDSDGSFFLYSKLTVDKSRWQQGNVFSCSVMHEALHNHYTQKSLSLSPGK

SEQ ID NO: 1656 - protein, 984 aa, Artificial Sequence
  Synthetic peptide
EVQLLESGGGMVQPGGSLRLSCAASGFTFSSYAMSWVRQAPGKGLEWVSAISGSGGRTFYADSVEGRFTISRDNSKNTLYLQMNSLRAEDTAVYYCAKHDYSNYPYFDYWGQGTLVTVSSGGGGSGGGGSGGGGSEIVLTQSPGTLSLSPGERATLSCRASQSVRSNYLAWYQQKPGQAPRLLIYGASSRATGIPDRFSGSGSGTDFTLTISRLEPEDFAVYYCQQYGDLPFTFGPGTKVEIKSGGGGSEVQLVESGGGLVQPGGSLKLSCAASGFTFNKYAMNWVRQAPGKGLEWVARIRSKYNNYATYYADSVKDRFTISRDDSKNTAYLQMNNLKTEDTAVYYCVRHGNFGNSYISYWAYWGQGTLVTVSSGGGGSGGGGSGGGGSQTVVTQEPSLTVSPGGTVTLTCGSSTGAVTSGNYPNWVQQKPGQAPRGLIGGTKFLAPGTPARFSGSLLGGKAALTLSGVQPEDEAEYYCVLWYSNRWVFGGGTKLTVLGGGGDKTHTCPPCPAPELLGGPSVFLFPPKPKDTLMISRTPEVTCVVVDVSHEDPEVKFNWYVDGVEVHNAKTKPCEEQYGSTYRCVSVLTVLHQDWLNGKEYKCKVSNKALPAPIEKTISKAKGQPREPQVYTLPPSREEMTKNQVSLTCLVKGFYPSDIAVEWESNGQPENNYKTTPPVLDSDGSFFLYSKLTVDKSRWQQGNVFSCSVMHEALHNHYTQKSLSLSPGGGGSGGGGSGGGGSGGGGSGGGGSGGGGSDKTHTCPPCPAPELLGGPSVFLFPPKPKDTLMISRTPEVTCVVVDVSHEDPEVKFNWYVDGVEVHNAKTKPCEEQYGSTYRCVSVLTVLHQDWLNGKEYKCKVSNKALPAPIEKTISKAKGQPREPQVYTLPPSREEMTKNQVSLTCLVKGFYPSDIAVEWESNGQPENNYKTTPPVLDSDGSFFLYSKLTVDKSRWQQGNVFSCSVMHEALHNHYTQKSLSLSPGK

SEQ ID NO: 1657 - protein, 984 aa, Artificial Sequence
  Synthetic peptide
EVQLLESGGGMVQPGGSLRLSCAASGFTFSSYAMSWVRQAPGKCLEWVSAISGSGGRTFYADSVEGRFTISRDNSKNTLYLQMNSLRAEDTAVYYCAKHDYSNYPYFDYWGQGTLVTVSSGGGGSGGGGSGGGGSEIVLTQSPGTLSLSPGERATLSCRASQSVRSNYLAWYQQKPGQAPRLLIYGASSRATGIPDRFSGSGSGTDFTLTISRLEPEDFAVYYCQQYGDLPFTFGCGTKVEIKSGGGGSEVQLVESGGGLVQPGGSLKLSCAASGFTFNKYAMNWVRQAPGKGLEWVARIRSKYNNYATYYADSVKDRFTISRDDSKNTAYLQMNNLKTEDTAVYYCVRHGNFGNSYISYWAYWGQGTLVTVSSGGGGSGGGGSGGGGSQTVVTQEPSLTVSPGGTVTLTCGSSTGAVTSGNYPNWVQQKPGQAPRGLIGGTKFLAPGTPARFSGSLLGGKAALTLSGVQPEDEAEYYCVLWYSNRWVFGGGTKLTVLGGGGDKTHTCPPCPAPELLGGPSVFLFPPKPKDTLMISRTPEVTCVVVDVSHEDPEVKFNWYVDGVEVHNAKTKPCEEQYGSTYRCVSVLTVLHQDWLNGKEYKCKVSNKALPAPIEKTISKAKGQPREPQVYTLPPSREEMTKNQVSLTCLVKGFYPSDIAVEWESNGQPENNYKTTPPVLDSDGSFFLYSKLTVDKSRWQQGNVFSCSVMHEALHNHYTQKSLSLSPGGGGSGGGGSGGGGSGGGGSGGGGSGGGGSDKTHTCPPCPAPELLGGPSVFLFPPKPKDTLMISRTPEVTCVVVDVSHEDPEVKFNWYVDGVEVHNAKTKPCEEQYGSTYRCVSVLTVLHQDWLNGKEYKCKVSNKALPAPIEKTISKAKGQPREPQVYTLPPSREEMTKNQVSLTCLVKGFYPSDIAVEWESNGQPENNYKTTPPVLDSDGSFFLYSKLTVDKSRWQQGNVFSCSVMHEALHNHYTQKSLSLSPGK

SEQ ID NO: 1658 - protein, 984 aa, Artificial Sequence
  Synthetic peptide
EVQLLESGGGMVQPGGSLRLSCAASGFTFSSYAMSWVRQAPGKGLEWVSAISGSGGRTFYADSVEGRFTISRDNSKNTLYLQMNSLRAEDTAVYYCAKHDYSNYPYFDYWGQGTLVTVSSGGGGSGGGGSGGGGSEIVLTQSPGTLSLSPGERATLSCRASQSVRSSYLAWYQQKPGQAPRLLIYGASSRATGIPDRFSGSGSGTDFTLTISRLEPEDFAVYYCQQYGSSPFTFGPGTKVEIKSGGGGSEVQLVESGGGLVQPGGSLKLSCAASGFTFNKYAMNWVRQAPGKGLEWVARIRSKYNNYATYYADSVKDRFTISRDDSKNTAYLQMNNLKTEDTAVYYCVRHGNFGNSYISYWAYWGQGTLVTVSSGGGGSGGGGSGGGGSQTVVTQEPSLTVSPGGTVTLTCGSSTGAVTSGNYPNWVQQKPGQAPRGLIGGTKFLAPGTPARFSGSLLGGKAALTLSGVQPEDEAEYYCVLWYSNRWVFGGGTKLTVLGGGGDKTHTCPPCPAPELLGGPSVFLFPPKPKDTLMISRTPEVTCVVVDVSHEDPEVKFNWYVDGVEVHNAKTKPCEEQYGSTYRCVSVLTVLHQDWLNGKEYKCKVSNKALPAPIEKTISKAKGQPREPQVYTLPPSREEMTKNQVSLTCLVKGFYPSDIAVEWESNGQPENNYKTTPPVLDSDGSFFLYSKLTVDKSRWQQGNVFSCSVMHEALHNHYTQKSLSLSPGGGGSGGGGSGGGGSGGGGSGGGGSGGGGSDKTHTCPPCPAPELLGGPSVFLFPPKPKDTLMISRTPEVTCVVVDVSHEDPEVKFNWYVDGVEVHNAKTKPCEEQYGSTYRCVSVLTVLHQDWLNGKEYKCKVSNKALPAPIEKTISKAKGQPREPQVYTLPPSREEMTKNQVSLTCLVKGFYPSDIAVEWESNGQPENNYKTTPPVLDSDGSFFLYSKLTVDKSRWQQGNVFSCSVMHEALHNHYTQKSLSLSPGK

SEQ ID NO: 1659 - protein, 984 aa, Artificial Sequence
  Synthetic peptide
EVQLLESGGGMVQPGGSLRLSCAASGFTFSSYAMSWVRQAPGKCLEWVSAISGSGGRTFYADSVEGRFTISRDNSKNTLYLQMNSLRAEDTAVYYCAKHDYSNYPYFDYWGQGTLVTVSSGGGGSGGGGSGGGGSEIVLTQSPGTLSLSPGERATLSCRASQSVRSSYLAWYQQKPGQAPRLLIYGASSRATGIPDRFSGSGSGTDFTLTISRLEPEDFAVYYCQQYGSSPFTFGCGTKVEIKSGGGGSEVQLVESGGGLVQPGGSLKLSCAASGFTFNKYAMNWVRQAPGKGLEWVARIRSKYNNYATYYADSVKDRFTISRDDSKNTAYLQMNNLKTEDTAVYYCVRHGNFGNSYISYWAYWGQGTLVTVSSGGGGSGGGGSGGGGSQTVVTQEPSLTVSPGGTVTLTCGSSTGAVTSGNYPNWVQQKPGQAPRGLIGGTKFLAPGTPARFSGSLLGGKAALTLSGVQPEDEAEYYCVLWYSNRWVFGGGTKLTVLGGGGDKTHTCPPCPAPELLGGPSVFLFPPKPKDTLMISRTPEVTCVVVDVSHEDPEVKFNWYVDGVEVHNAKTKPCEEQYGSTYRCVSVLTVLHQDWLNGKEYKCKVSNKALPAPIEKTISKAKGQPREPQVYTLPPSREEMTKNQVSLTCLVKGFYPSDIAVEWESNGQPENNYKTTPPVLDSDGSFFLYSKLTVDKSRWQQGNVFSCSVMHEALHNHYTQKSLSLSPGGGGSGGGGSGGGGSGGGGSGGGGSGGGGSDKTHTCPPCPAPELLGGPSVFLFPPKPKDTLMISRTPEVTCVVVDVSHEDPEVKFNWYVDGVEVHNAKTKPCEEQYGSTYRCVSVLTVLHQDWLNGKEYKCKVSNKALPAPIEKTISKAKGQPREPQVYTLPPSREEMTKNQVSLTCLVKGFYPSDIAVEWESNGQPENNYKTTPPVLDSDGSFFLYSKLTVDKSRWQQGNVFSCSVMHEALHNHYTQKSLSLSPGK

SEQ ID NO: 1660 - protein, 984 aa, Artificial Sequence
  Synthetic peptide
EVQLLESGGGLVQPGGSLRLSCAASGFTFSSYAMSWVRQAPGKGLEWVSAISGSGGSTFYADSVQGRFTISRDNSKNTLYLQVNSLRAEDTAVYYCARHDYSNYPYFDYWGQGTLVTVSSGGGGSGGGGSGGGGSEIVLTQSPGTLSLSPGERATLSCRASQSVRGNYLAWYQQKPGQAPRLLIYGASSRATGIPDRFSGSGSGTDFTLTISRLEPEDFAVYYCQQYGYSPFTFGPGTKVEIKSGGGGSEVQLVESGGGLVQPGGSLKLSCAASGFTFNKYAMNWVRQAPGKGLEWVARIRSKYNNYATYYADSVKDRFTISRDDSKNTAYLQMNNLKTEDTAVYYCVRHGNFGNSYISYWAYWGQGTLVTVSSGGGGSGGGGSGGGGSQTVVTQEPSLTVSPGGTVTLTCGSSTGAVTSGNYPNWVQQKPGQAPRGLIGGTKFLAPGTPARFSGSLLGGKAALTLSGVQPEDEAEYYCVLWYSNRWVFGGGTKLTVLGGGGDKTHTCPPCPAPELLGGPSVFLFPPKPKDTLMISRTPEVTCVVVDVSHEDPEVKFNWYVDGVEVHNAKTKPCEEQYGSTYRCVSVLTVLHQDWLNGKEYKCKVSNKALPAPIEKTISKAKGQPREPQVYTLPPSREEMTKNQVSLTCLVKGFYPSDIAVEWESNGQPENNYKTTPPVLDSDGSFFLYSKLTVDKSRWQQGNVFSCSVMHEALHNHYTQKSLSLSPGGGGSGGGGSGGGGSGGGGSGGGGSGGGGSDKTHTCPPCPAPELLGGPSVFLFPPKPKDTLMISRTPEVTCVVVDVSHEDPEVKFNWYVDGVEVHNAKTKPCEEQYGSTYRCVSVLTVLHQDWLNGKEYKCKVSNKALPAPIEKTISKAKGQPREPQVYTLPPSREEMTKNQVSLTCLVKGFYPSDIAVEWESNGQPENNYKTTPPVLDSDGSFFLYSKLTVDKSRWQQGNVFSCSVMHEALHNHYTQKSLSLSPGK

SEQ ID NO: 1661 - protein, 984 aa, Artificial Sequence
  Synthetic peptide
EVQLLESGGGLVQPGGSLRLSCAASGFTFSSYAMSWVRQAPGKCLEWVSAISGSGGSTFYADSVQGRFTISRDNSKNTLYLQVNSLRAEDTAVYYCARHDYSNYPYFDYWGQGTLVTVSSGGGGSGGGGSGGGGSEIVLTQSPGTLSLSPGERATLSCRASQSVRGNYLAWYQQKPGQAPRLLIYGASSRATGIPDRFSGSGSGTDFTLTISRLEPEDFAVYYCQQYGYSPFTFGCGTKVEIKSGGGGSEVQLVESGGGLVQPGGSLKLSCAASGFTFNKYAMNWVRQAPGKGLEWVARIRSKYNNYATYYADSVKDRFTISRDDSKNTAYLQMNNLKTEDTAVYYCVRHGNFGNSYISYWAYWGQGTLVTVSSGGGGSGGGGSGGGGSQTVVTQEPSLTVSPGGTVTLTCGSSTGAVTSGNYPNWVQQKPGQAPRGLIGGTKFLAPGTPARFSGSLLGGKAALTLSGVQPEDEAEYYCVLWYSNRWVFGGGTKLTVLGGGGDKTHTCPPCPAPELLGGPSVFLFPPKPKDTLMISRTPEVTCVVVDVSHEDPEVKFNWYVDGVEVHNAKTKPCEEQYGSTYRCVSVLTVLHQDWLNGKEYKCKVSNKALPAPIEKTISKAKGQPREPQVYTLPPSREEMTKNQVSLTCLVKGFYPSDIAVEWESNGQPENNYKTTPPVLDSDGSFFLYSKLTVDKSRWQQGNVFSCSVMHEALHNHYTQKSLSLSPGGGGSGGGGSGGGGSGGGGSGGGGSGGGGSDKTHTCPPCPAPELLGGPSVFLFPPKPKDTLMISRTPEVTCVVVDVSHEDPEVKFNWYVDGVEVHNAKTKPCEEQYGSTYRCVSVLTVLHQDWLNGKEYKCKVSNKALPAPIEKTISKAKGQPREPQVYTLPPSREEMTKNQVSLTCLVKGFYPSDIAVEWESNGQPENNYKTTPPVLDSDGSFFLYSKLTVDKSRWQQGNVFSCSVMHEALHNHYTQKSLSLSPGK

SEQ ID NO: 1662 - protein, 984 aa, Artificial Sequence
  Synthetic peptide
EVQLLESGGGLVQPGGSLRLSCAASGFTFSTYAMSWVRQAPGKGLEWVSAISGSGGGTFYADSVKGRFTISRDNSKNTLYLQMNSLRAEDTAVYYCAKHDYSNYPYFDYWGQGTLVTVSSGGGGSGGGGSGGGGSEIVLTQSPGTLSLSPGERATLSCRASQSIRSNYLAWYQQKPGQAPRLLIYGASSRATGIPDRFSGSGSGTDFTLTISRLEPEDFAVYYCQQYGSSPFTFGPGTKVEIKSGGGGSEVQLVESGGGLVQPGGSLKLSCAASGFTFNKYAMNWVRQAPGKGLEWVARIRSKYNNYATYYADSVKDRFTISRDDSKNTAYLQMNNLKTEDTAVYYCVRHGNFGNSYISYWAYWGQGTLVTVSSGGGGSGGGGSGGGGSQTVVTQEPSLTVSPGGTVTLTCGSSTGAVTSGNYPNWVQQKPGQAPRGLIGGTKFLAPGTPARFSGSLLGGKAALTLSGVQPEDEAEYYCVLWYSNRWVFGGGTKLTVLGGGGDKTHTCPPCPAPELLGGPSVFLFPPKPKDTLMISRTPEVTCVVVDVSHEDPEVKFNWYVDGVEVHNAKTKPCEEQYGSTYRCVSVLTVLHQDWLNGKEYKCKVSNKALPAPIEKTISKAKGQPREPQVYTLPPSREEMTKNQVSLTCLVKGFYPSDIAVEWESNGQPENNYKTTPPVLDSDGSFFLYSKLTVDKSRWQQGNVFSCSVMHEALHNHYTQKSLSLSPGGGGSGGGGSGGGGSGGGGSGGGGSGGGGSDKTHTCPPCPAPELLGGPSVFLFPPKPKDTLMISRTPEVTCVVVDVSHEDPEVKFNWYVDGVEVHNAKTKPCEEQYGSTYRCVSVLTVLHQDWLNGKEYKCKVSNKALPAPIEKTISKAKGQPREPQVYTLPPSREEMTKNQVSLTCLVKGFYPSDIAVEWESNGQPENNYKTTPPVLDSDGSFFLYSKLTVDKSRWQQGNVFSCSVMHEALHNHYTQKSLSLSPGK

SEQ ID NO: 1663 - protein, 984 aa, Artificial Sequence
  Synthetic peptide
EVQLLESGGGLVQPGGSLRLSCAASGFTFSTYAMSWVRQAPGKCLEWVSAISGSGGGTFYADSVKGRFTISRDNSKNTLYLQMNSLRAEDTAVYYCAKHDYSNYPYFDYWGQGTLVTVSSGGGGSGGGGSGGGGSEIVLTQSPGTLSLSPGERATLSCRASQSIRSNYLAWYQQKPGQAPRLLIYGASSRATGIPDRFSGSGSGTDFTLTISRLEPEDFAVYYCQQYGSSPFTFGCGTKVEIKSGGGGSEVQLVESGGGLVQPGGSLKLSCAASGFTFNKYAMNWVRQAPGKGLEWVARIRSKYNNYATYYADSVKDRFTISRDDSKNTAYLQMNNLKTEDTAVYYCVRHGNFGNSYISYWAYWGQGTLVTVSSGGGGSGGGGSGGGGSQTVVTQEPSLTVSPGGTVTLTCGSSTGAVTSGNYPNWVQQKPGQAPRGLIGGTKFLAPGTPARFSGSLLGGKAALTLSGVQPEDEAEYYCVLWYSNRWVFGGGTKLTVLGGGGDKTHTCPPCPAPELLGGPSVFLFPPKPKDTLMISRTPEVTCVVVDVSHEDPEVKFNWYVDGVEVHNAKTKPCEEQYGSTYRCVSVLTVLHQDWLNGKEYKCKVSNKALPAPIEKTISKAKGQPREPQVYTLPPSREEMTKNQVSLTCLVKGFYPSDIAVEWESNGQPENNYKTTPPVLDSDGSFFLYSKLTVDKSRWQQGNVFSCSVMHEALHNHYTQKSLSLSPGGGGSGGGGSGGGGSGGGGSGGGGSGGGGSDKTHTCPPCPAPELLGGPSVFLFPPKPKDTLMISRTPEVTCVVVDVSHEDPEVKFNWYVDGVEVHNAKTKPCEEQYGSTYRCVSVLTVLHQDWLNGKEYKCKVSNKALPAPIEKTISKAKGQPREPQVYTLPPSREEMTKNQVSLTCLVKGFYPSDIAVEWESNGQPENNYKTTPPVLDSDGSFFLYSKLTVDKSRWQQGNVFSCSVMHEALHNHYTQKSLSLSPGK

SEQ ID NO: 1664 - protein, 984 aa, Artificial Sequence
  Synthetic peptide
EVQLLESGGGLVQPGGSLRLSCAASGFTFSTYAMSWVRQAPGKGLEWVSLISGSGGRTYYADSVKGRFTISRDNSKNTLYLQMNSLRAEDTAVYYCAKHDYSNYPYFDYWGQGTLVTVSSGGGGSGGGGSGGGGSEIVLTQSPGTLSLSPGERATLSCRASQSVRSNYLAWYQQKPGQAPRLLIYGASNRATGIPDRFSGSGSGTDFTLTISRLEPEDFAVYSCQQYGISPPTFGGGTKVEIKSGGGGSEVQLVESGGGLVQPGGSLKLSCAASGFTFNKYAMNWVRQAPGKGLEWVARIRSKYNNYATYYADSVKDRFTISRDDSKNTAYLQMNNLKTEDTAVYYCVRHGNFGNSYISYWAYWGQGTLVTVSSGGGGSGGGGSGGGGSQTVVTQEPSLTVSPGGTVTLTCGSSTGAVTSGNYPNWVQQKPGQAPRGLIGGTKFLAPGTPARFSGSLLGGKAALTLSGVQPEDEAEYYCVLWYSNRWVFGGGTKLTVLGGGGDKTHTCPPCPAPELLGGPSVFLFPPKPKDTLMISRTPEVTCVVVDVSHEDPEVKFNWYVDGVEVHNAKTKPCEEQYGSTYRCVSVLTVLHQDWLNGKEYKCKVSNKALPAPIEKTISKAKGQPREPQVYTLPPSREEMTKNQVSLTCLVKGFYPSDIAVEWESNGQPENNYKTTPPVLDSDGSFFLYSKLTVDKSRWQQGNVFSCSVMHEALHNHYTQKSLSLSPGGGGSGGGGSGGGGSGGGGSGGGGSGGGGSDKTHTCPPCPAPELLGGPSVFLFPPKPKDTLMISRTPEVTCVVVDVSHEDPEVKFNWYVDGVEVHNAKTKPCEEQYGSTYRCVSVLTVLHQDWLNGKEYKCKVSNKALPAPIEKTISKAKGQPREPQVYTLPPSREEMTKNQVSLTCLVKGFYPSDIAVEWESNGQPENNYKTTPPVLDSDGSFFLYSKLTVDKSRWQQGNVFSCSVMHEALHNHYTQKSLSLSPGK

SEQ ID NO: 1665 - protein, 984 aa, Artificial Sequence
  Synthetic peptide
EVQLLESGGGLVQPGGSLRLSCAASGFTFSTYAMSWVRQAPGKCLEWVSLISGSGGRTYYADSVKGRFTISRDNSKNTLYLQMNSLRAEDTAVYYCAKHDYSNYPYFDYWGQGTLVTVSSGGGGSGGGGSGGGGSEIVLTQSPGTLSLSPGERATLSCRASQSVRSNYLAWYQQKPGQAPRLLIYGASNRATGIPDRFSGSGSGTDFTLTISRLEPEDFAVYSCQQYGISPPTFGCGTKVEIKSGGGGSEVQLVESGGGLVQPGGSLKLSCAASGFTFNKYAMNWVRQAPGKGLEWVARIRSKYNNYATYYADSVKDRFTISRDDSKNTAYLQMNNLKTEDTAVYYCVRHGNFGNSYISYWAYWGQGTLVTVSSGGGGSGGGGSGGGGSQTVVTQEPSLTVSPGGTVTLTCGSSTGAVTSGNYPNWVQQKPGQAPRGLIGGTKFLAPGTPARFSGSLLGGKAALTLSGVQPEDEAEYYCVLWYSNRWVFGGGTKLTVLGGGGDKTHTCPPCPAPELLGGPSVFLFPPKPKDTLMISRTPEVTCVVVDVSHEDPEVKFNWYVDGVEVHNAKTKPCEEQYGSTYRCVSVLTVLHQDWLNGKEYKCKVSNKALPAPIEKTISKAKGQPREPQVYTLPPSREEMTKNQVSLTCLVKGFYPSDIAVEWESNGQPENNYKTTPPVLDSDGSFFLYSKLTVDKSRWQQGNVFSCSVMHEALHNHYTQKSLSLSPGGGGSGGGGSGGGGSGGGGSGGGGSGGGGSDKTHTCPPCPAPELLGGPSVFLFPPKPKDTLMISRTPEVTCVVVDVSHEDPEVKFNWYVDGVEVHNAKTKPCEEQYGSTYRCVSVLTVLHQDWLNGKEYKCKVSNKALPAPIEKTISKAKGQPREPQVYTLPPSREEMTKNQVSLTCLVKGFYPSDIAVEWESNGQPENNYKTTPPVLDSDGSFFLYSKLTVDKSRWQQGNVFSCSVMHEALHNHYTQKSLSLSPGK

SEQ ID NO: 1666 - protein, 983 aa, Artificial Sequence
  Synthetic peptide
EVQLLESGGGLVQPGGSLRLSCAASGFTFSSYAMSWVRQSPGKGLEWVSAISGSGGRAQYADSVQGRFTVSRDNSKNTLYLQMNSLRAEDTAVYYCAKHDYSNYPYFDYWGQGTLVTVSSGGGGSGGGGSGGGGSEIVLTQSPATLSVSPGERATLSCRASQSVSSNLAWYQQKPGQAPRLLIYGSSSRATGIPDRFSGSGSGTDFTLTISRLEPEDFAVYYCQQYGSSPPPFGGGTKVEIKSGGGGSEVQLVESGGGLVQPGGSLKLSCAASGFTFNKYAMNWVRQAPGKGLEWVARIRSKYNNYATYYADSVKDRFTISRDDSKNTAYLQMNNLKTEDTAVYYCVRHGNFGNSYISYWAYWGQGTLVTVSSGGGGSGGGGSGGGGSQTVVTQEPSLTVSPGGTVTLTCGSSTGAVTSGNYPNWVQQKPGQAPRGLIGGTKFLAPGTPARFSGSLLGGKAALTLSGVQPEDEAEYYCVLWYSNRWVFGGGTKLTVLGGGGDKTHTCPPCPAPELLGGPSVFLFPPKPKDTLMISRTPEVTCVVVDVSHEDPEVKFNWYVDGVEVHNAKTKPCEEQYGSTYRCVSVLTVLHQDWLNGKEYKCKVSNKALPAPIEKTISKAKGQPREPQVYTLPPSREEMTKNQVSLTCLVKGFYPSDIAVEWESNGQPENNYKTTPPVLDSDGSFFLYSKLTVDKSRWQQGNVFSCSVMHEALHNHYTQKSLSLSPGGGGSGGGGSGGGGSGGGGSGGGGSGGGGSDKTHTCPPCPAPELLGGPSVFLFPPKPKDTLMISRTPEVTCVVVDVSHEDPEVKFNWYVDGVEVHNAKTKPCEEQYGSTYRCVSVLTVLHQDWLNGKEYKCKVSNKALPAPIEKTISKAKGQPREPQVYTLPPSREEMTKNQVSLTCLVKGFYPSDIAVEWESNGQPENNYKTTPPVLDSDGSFFLYSKLTVDKSRWQQGNVFSCSVMHEALHNHYTQKSLSLSPGK

SEQ ID NO: 1667 - protein, 983 aa, Artificial Sequence
  Synthetic peptide
EVQLLESGGGLVQPGGSLRLSCAASGFTFSSYAMSWVRQSPGKCLEWVSAISGSGGRAQYADSVQGRFTVSRDNSKNTLYLQMNSLRAEDTAVYYCAKHDYSNYPYFDYWGQGTLVTVSSGGGGSGGGGSGGGGSEIVLTQSPATLSVSPGERATLSCRASQSVSSNLAWYQQKPGQAPRLLIYGSSSRATGIPDRFSGSGSGTDFTLTISRLEPEDFAVYYCQQYGSSPPPFGCGTKVEIKSGGGGSEVQLVESGGGLVQPGGSLKLSCAASGFTFNKYAMNWVRQAPGKGLEWVARIRSKYNNYATYYADSVKDRFTISRDDSKNTAYLQMNNLKTEDTAVYYCVRHGNFGNSYISYWAYWGQGTLVTVSSGGGGSGGGGSGGGGSQTVVTQEPSLTVSPGGTVTLTCGSSTGAVTSGNYPNWVQQKPGQAPRGLIGGTKFLAPGTPARFSGSLLGGKAALTLSGVQPEDEAEYYCVLWYSNRWVFGGGTKLTVLGGGGDKTHTCPPCPAPELLGGPSVFLFPPKPKDTLMISRTPEVTCVVVDVSHEDPEVKFNWYVDGVEVHNAKTKPCEEQYGSTYRCVSVLTVLHQDWLNGKEYKCKVSNKALPAPIEKTISKAKGQPREPQVYTLPPSREEMTKNQVSLTCLVKGFYPSDIAVEWESNGQPENNYKTTPPVLDSDGSFFLYSKLTVDKSRWQQGNVFSCSVMHEALHNHYTQKSLSLSPGGGGSGGGGSGGGGSGGGGSGGGGSGGGGSDKTHTCPPCPAPELLGGPSVFLFPPKPKDTLMISRTPEVTCVVVDVSHEDPEVKFNWYVDGVEVHNAKTKPCEEQYGSTYRCVSVLTVLHQDWLNGKEYKCKVSNKALPAPIEKTISKAKGQPREPQVYTLPPSREEMTKNQVSLTCLVKGFYPSDIAVEWESNGQPENNYKTTPPVLDSDGSFFLYSKLTVDKSRWQQGNVFSCSVMHEALHNHYTQKSLSLSPGK

SEQ ID NO: 1668 - protein, 984 aa, Artificial Sequence
  Synthetic peptide
EVQLLESGGGMVQPGGSLRLSCAASGFTFSSYAMSWVRQAPGKGLEWVSAISGSGGRTFYADSVEGRFTISRDNSKNTLYLQMNSLRAEDTAVYYCTKHDYSNYPYFDYWGQGTLVTVSSGGGGSGGGGSGGGGSEIVLTQSPGTLSLSPGERATLSCRASQGVRSDYLAWYQQKPGQAPRLLIYGASSRATGIPDRFSGSGSGTDFTLTISRLEPEDFAVYHCQQYGSTPPTFGGGTKVEIKSGGGGSEVQLVESGGGLVQPGGSLKLSCAASGFTFNKYAMNWVRQAPGKGLEWVARIRSKYNNYATYYADSVKDRFTISRDDSKNTAYLQMNNLKTEDTAVYYCVRHGNFGNSYISYWAYWGQGTLVTVSSGGGGSGGGGSGGGGSQTVVTQEPSLTVSPGGTVTLTCGSSTGAVTSGNYPNWVQQKPGQAPRGLIGGTKFLAPGTPARFSGSLLGGKAALTLSGVQPEDEAEYYCVLWYSNRWVFGGGTKLTVLGGGGDKTHTCPPCPAPELLGGPSVFLFPPKPKDTLMISRTPEVTCVVVDVSHEDPEVKFNWYVDGVEVHNAKTKPCEEQYGSTYRCVSVLTVLHQDWLNGKEYKCKVSNKALPAPIEKTISKAKGQPREPQVYTLPPSREEMTKNQVSLTCLVKGFYPSDIAVEWESNGQPENNYKTTPPVLDSDGSFFLYSKLTVDKSRWQQGNVFSCSVMHEALHNHYTQKSLSLSPGGGGSGGGGSGGGGSGGGGSGGGGSGGGGSDKTHTCPPCPAPELLGGPSVFLFPPKPKDTLMISRTPEVTCVVVDVSHEDPEVKFNWYVDGVEVHNAKTKPCEEQYGSTYRCVSVLTVLHQDWLNGKEYKCKVSNKALPAPIEKTISKAKGQPREPQVYTLPPSREEMTKNQVSLTCLVKGFYPSDIAVEWESNGQPENNYKTTPPVLDSDGSFFLYSKLTVDKSRWQQGNVFSCSVMHEALHNHYTQKSLSLSPGK

SEQ ID NO: 1669 - protein, 984 aa, Artificial Sequence
  Synthetic peptide
EVQLLESGGGMVQPGGSLRLSCAASGFTFSSYAMSWVRQAPGKCLEWVSAISGSGGRTFYADSVEGRFTISRDNSKNTLYLQMNSLRAEDTAVYYCTKHDYSNYPYFDYWGQGTLVTVSSGGGGSGGGGSGGGGSEIVLTQSPGTLSLSPGERATLSCRASQGVRSDYLAWYQQKPGQAPRLLIYGASSRATGIPDRFSGSGSGTDFTLTISRLEPEDFAVYHCQQYGSTPPTFGCGTKVEIKSGGGGSEVQLVESGGGLVQPGGSLKLSCAASGFTFNKYAMNWVRQAPGKGLEWVARIRSKYNNYATYYADSVKDRFTISRDDSKNTAYLQMNNLKTEDTAVYYCVRHGNFGNSYISYWAYWGQGTLVTVSSGGGGSGGGGSGGGGSQTVVTQEPSLTVSPGGTVTLTCGSSTGAVTSGNYPNWVQQKPGQAPRGLIGGTKFLAPGTPARFSGSLLGGKAALTLSGVQPEDEAEYYCVLWYSNRWVFGGGTKLTVLGGGGDKTHTCPPCPAPELLGGPSVFLFPPKPKDTLMISRTPEVTCVVVDVSHEDPEVKFNWYVDGVEVHNAKTKPCEEQYGSTYRCVSVLTVLHQDWLNGKEYKCKVSNKALPAPIEKTISKAKGQPREPQVYTLPPSREEMTKNQVSLTCLVKGFYPSDIAVEWESNGQPENNYKTTPPVLDSDGSFFLYSKLTVDKSRWQQGNVFSCSVMHEALHNHYTQKSLSLSPGGGGSGGGGSGGGGSGGGGSGGGGSGGGGSDKTHTCPPCPAPELLGGPSVFLFPPKPKDTLMISRTPEVTCVVVDVSHEDPEVKFNWYVDGVEVHNAKTKPCEEQYGSTYRCVSVLTVLHQDWLNGKEYKCKVSNKALPAPIEKTISKAKGQPREPQVYTLPPSREEMTKNQVSLTCLVKGFYPSDIAVEWESNGQPENNYKTTPPVLDSDGSFFLYSKLTVDKSRWQQGNVFSCSVMHEALHNHYTQKSLSLSPGK

SEQ ID NO: 1670 - protein, 984 aa, Artificial Sequence
  Synthetic peptide
EVQLLESGGGLVQPGGSLRLSCAASGFTFSSYAMSWVRQAPGKGLEWVSAIGDGGGYTYYADSVKGRFTISRDNSKNTLSLLMNSLRAEDTAVYYCARHDYSNYPYFDYWGQGTLVTVSSGGGGSGGGGSGGGGSEIVLTQSPGTLSLSPGERATLSCRASQGVRSSYFAWYQQKPGQAPRLLIYGASTRATGIPARFSGSGSGTDFTLTISRLEPEDFAVYYCQQYGSSPPTFGQGTKVEIKSGGGGSEVQLVESGGGLVQPGGSLKLSCAASGFTFNKYAMNWVRQAPGKGLEWVARIRSKYNNYATYYADSVKDRFTISRDDSKNTAYLQMNNLKTEDTAVYYCVRHGNFGNSYISYWAYWGQGTLVTVSSGGGGSGGGGSGGGGSQTVVTQEPSLTVSPGGTVTLTCGSSTGAVTSGNYPNWVQQKPGQAPRGLIGGTKFLAPGTPARFSGSLLGGKAALTLSGVQPEDEAEYYCVLWYSNRWVFGGGTKLTVLGGGGDKTHTCPPCPAPELLGGPSVFLFPPKPKDTLMISRTPEVTCVVVDVSHEDPEVKFNWYVDGVEVHNAKTKPCEEQYGSTYRCVSVLTVLHQDWLNGKEYKCKVSNKALPAPIEKTISKAKGQPREPQVYTLPPSREEMTKNQVSLTCLVKGFYPSDIAVEWESNGQPENNYKTTPPVLDSDGSFFLYSKLTVDKSRWQQGNVFSCSVMHEALHNHYTQKSLSLSPGGGGSGGGGSGGGGSGGGGSGGGGSGGGGSDKTHTCPPCPAPELLGGPSVFLFPPKPKDTLMISRTPEVTCVVVDVSHEDPEVKFNWYVDGVEVHNAKTKPCEEQYGSTYRCVSVLTVLHQDWLNGKEYKCKVSNKALPAPIEKTISKAKGQPREPQVYTLPPSREEMTKNQVSLTCLVKGFYPSDIAVEWESNGQPENNYKTTPPVLDSDGSFFLYSKLTVDKSRWQQGNVFSCSVMHEALHNHYTQKSLSLSPGK

SEQ ID NO: 1671 - protein, 984 aa, Artificial Sequence
  Synthetic peptide
EVQLLESGGGLVQPGGSLRLSCAASGFTFSSYAMSWVRQAPGKCLEWVSAIGDGGGYTYYADSVKGRFTISRDNSKNTLSLLMNSLRAEDTAVYYCARHDYSNYPYFDYWGQGTLVTVSSGGGGSGGGGSGGGGSEIVLTQSPGTLSLSPGERATLSCRASQGVRSSYFAWYQQKPGQAPRLLIYGASTRATGIPARFSGSGSGTDFTLTISRLEPEDFAVYYCQQYGSSPPTFGCGTKVEIKSGGGGSEVQLVESGGGLVQPGGSLKLSCAASGFTFNKYAMNWVRQAPGKGLEWVARIRSKYNNYATYYADSVKDRFTISRDDSKNTAYLQMNNLKTEDTAVYYCVRHGNFGNSYISYWAYWGQGTLVTVSSGGGGSGGGGSGGGGSQTVVTQEPSLTVSPGGTVTLTCGSSTGAVTSGNYPNWVQQKPGQAPRGLIGGTKFLAPGTPARFSGSLLGGKAALTLSGVQPEDEAEYYCVLWYSNRWVFGGGTKLTVLGGGGDKTHTCPPCPAPELLGGPSVFLFPPKPKDTLMISRTPEVTCVVVDVSHEDPEVKFNWYVDGVEVHNAKTKPCEEQYGSTYRCVSVLTVLHQDWLNGKEYKCKVSNKALPAPIEKTISKAKGQPREPQVYTLPPSREEMTKNQVSLTCLVKGFYPSDIAVEWESNGQPENNYKTTPPVLDSDGSFFLYSKLTVDKSRWQQGNVFSCSVMHEALHNHYTQKSLSLSPGGGGSGGGGSGGGGSGGGGSGGGGSGGGGSDKTHTCPPCPAPELLGGPSVFLFPPKPKDTLMISRTPEVTCVVVDVSHEDPEVKFNWYVDGVEVHNAKTKPCEEQYGSTYRCVSVLTVLHQDWLNGKEYKCKVSNKALPAPIEKTISKAKGQPREPQVYTLPPSREEMTKNQVSLTCLVKGFYPSDIAVEWESNGQPENNYKTTPPVLDSDGSFFLYSKLTVDKSRWQQGNVFSCSVMHEALHNHYTQKSLSLSPGK

SEQ ID NO: 1672 - protein, 984 aa, Artificial Sequence
  Synthetic peptide
EVQLLESGGGVVQPGRSLRLSCAASGFTFSSYAMSWVRQAPGKGLEWVSAISGSGGRTFYADSVEGRFTISRDNSKNTLYLQMNSLRAEDTAVYYCAKHDYSNYPYFDYWGQGTLVTVSSGGGGSGGGGSGGGGSEIVLTQSPGTLSLSPGERATLSCRASQSIRSNYLAWYQQKPGQAPRLLIYGASSRATGIPDRFSGSGSGTDFTLTISRLEPEDFAVYYCQQYGSSPPSFGQGTKVEIKSGGGGSEVQLVESGGGLVQPGGSLKLSCAASGFTFNKYAMNWVRQAPGKGLEWVARIRSKYNNYATYYADSVKDRFTISRDDSKNTAYLQMNNLKTEDTAVYYCVRHGNFGNSYISYWAYWGQGTLVTVSSGGGGSGGGGSGGGGSQTVVTQEPSLTVSPGGTVTLTCGSSTGAVTSGNYPNWVQQKPGQAPRGLIGGTKFLAPGTPARFSGSLLGGKAALTLSGVQPEDEAEYYCVLWYSNRWVFGGGTKLTVLGGGGDKTHTCPPCPAPELLGGPSVFLFPPKPKDTLMISRTPEVTCVVVDVSHEDPEVKFNWYVDGVEVHNAKTKPCEEQYGSTYRCVSVLTVLHQDWLNGKEYKCKVSNKALPAPIEKTISKAKGQPREPQVYTLPPSREEMTKNQVSLTCLVKGFYPSDIAVEWESNGQPENNYKTTPPVLDSDGSFFLYSKLTVDKSRWQQGNVFSCSVMHEALHNHYTQKSLSLSPGGGGSGGGGSGGGGSGGGGSGGGGSGGGGSDKTHTCPPCPAPELLGGPSVFLFPPKPKDTLMISRTPEVTCVVVDVSHEDPEVKFNWYVDGVEVHNAKTKPCEEQYGSTYRCVSVLTVLHQDWLNGKEYKCKVSNKALPAPIEKTISKAKGQPREPQVYTLPPSREEMTKNQVSLTCLVKGFYPSDIAVEWESNGQPENNYKTTPPVLDSDGSFFLYSKLTVDKSRWQQGNVFSCSVMHEALHNHYTQKSLSLSPGK

SEQ ID NO: 1673 - protein, 984 aa, Artificial Sequence
  Synthetic peptide
EVQLLESGGGVVQPGRSLRLSCAASGFTFSSYAMSWVRQAPGKCLEWVSAISGSGGRTFYADSVEGRFTISRDNSKNTLYLQMNSLRAEDTAVYYCAKHDYSNYPYFDYWGQGTLVTVSSGGGGSGGGGSGGGGSEIVLTQSPGTLSLSPGERATLSCRASQSIRSNYLAWYQQKPGQAPRLLIYGASSRATGIPDRFSGSGSGTDFTLTISRLEPEDFAVYYCQQYGSSPPSFGCGTKVEIKSGGGGSEVQLVESGGGLVQPGGSLKLSCAASGFTFNKYAMNWVRQAPGKGLEWVARIRSKYNNYATYYADSVKDRFTISRDDSKNTAYLQMNNLKTEDTAVYYCVRHGNFGNSYISYWAYWGQGTLVTVSSGGGGSGGGGSGGGGSQTVVTQEPSLTVSPGGTVTLTCGSSTGAVTSGNYPNWVQQKPGQAPRGLIGGTKFLAPGTPARFSGSLLGGKAALTLSGVQPEDEAEYYCVLWYSNRWVFGGGTKLTVLGGGGDKTHTCPPCPAPELLGGPSVFLFPPKPKDTLMISRTPEVTCVVVDVSHEDPEVKFNWYVDGVEVHNAKTKPCEEQYGSTYRCVSVLTVLHQDWLNGKEYKCKVSNKALPAPIEKTISKAKGQPREPQVYTLPPSREEMTKNQVSLTCLVKGFYPSDIAVEWESNGQPENNYKTTPPVLDSDGSFFLYSKLTVDKSRWQQGNVFSCSVMHEALHNHYTQKSLSLSPGGGGSGGGGSGGGGSGGGGSGGGGSGGGGSDKTHTCPPCPAPELLGGPSVFLFPPKPKDTLMISRTPEVTCVVVDVSHEDPEVKFNWYVDGVEVHNAKTKPCEEQYGSTYRCVSVLTVLHQDWLNGKEYKCKVSNKALPAPIEKTISKAKGQPREPQVYTLPPSREEMTKNQVSLTCLVKGFYPSDIAVEWESNGQPENNYKTTPPVLDSDGSFFLYSKLTVDKSRWQQGNVFSCSVMHEALHNHYTQKSLSLSPGK

SEQ ID NO: 1674 - protein, 984 aa, Artificial Sequence
  Synthetic peptide
EVQLLESGGGVVQPGRSLRLSCAASGFTFSSYAMSWVRQAPGKGLEWVSAISGSGGGTFYADSVEGRFTISRDNSKNTLYLQMNSLRAEDTAVYYCARHDYSNYPYFDYWGLGTLVTVSSGGGGSGGGGSGGGGSEIVLTQSPGTLSLSPGERATLSCRASQSVRSSYLAWYQQKPGQAPRLLIYGASSRATGIPDRFSGSGSGTDFTLTISRLEPEDFAVYSCQQYGDLPFTFGPGTKVEIKSGGGGSEVQLVESGGGLVQPGGSLKLSCAASGFTFNKYAMNWVRQAPGKGLEWVARIRSKYNNYATYYADSVKDRFTISRDDSKNTAYLQMNNLKTEDTAVYYCVRHGNFGNSYISYWAYWGQGTLVTVSSGGGGSGGGGSGGGGSQTVVTQEPSLTVSPGGTVTLTCGSSTGAVTSGNYPNWVQQKPGQAPRGLIGGTKFLAPGTPARFSGSLLGGKAALTLSGVQPEDEAEYYCVLWYSNRWVFGGGTKLTVLGGGGDKTHTCPPCPAPELLGGPSVFLFPPKPKDTLMISRTPEVTCVVVDVSHEDPEVKFNWYVDGVEVHNAKTKPCEEQYGSTYRCVSVLTVLHQDWLNGKEYKCKVSNKALPAPIEKTISKAKGQPREPQVYTLPPSREEMTKNQVSLTCLVKGFYPSDIAVEWESNGQPENNYKTTPPVLDSDGSFFLYSKLTVDKSRWQQGNVFSCSVMHEALHNHYTQKSLSLSPGGGGSGGGGSGGGGSGGGGSGGGGSGGGGSDKTHTCPPCPAPELLGGPSVFLFPPKPKDTLMISRTPEVTCVVVDVSHEDPEVKFNWYVDGVEVHNAKTKPCEEQYGSTYRCVSVLTVLHQDWLNGKEYKCKVSNKALPAPIEKTISKAKGQPREPQVYTLPPSREEMTKNQVSLTCLVKGFYPSDIAVEWESNGQPENNYKTTPPVLDSDGSFFLYSKLTVDKSRWQQGNVFSCSVMHEALHNHYTQKSLSLSPGK

SEQ ID NO: 1675 - protein, 984 aa, Artificial Sequence
  Synthetic peptide
EVQLLESGGGVVQPGRSLRLSCAASGFTFSSYAMSWVRQAPGKCLEWVSAISGSGGGTFYADSVEGRFTISRDNSKNTLYLQMNSLRAEDTAVYYCARHDYSNYPYFDYWGLGTLVTVSSGGGGSGGGGSGGGGSEIVLTQSPGTLSLSPGERATLSCRASQSVRSSYLAWYQQKPGQAPRLLIYGASSRATGIPDRFSGSGSGTDFTLTISRLEPEDFAVYSCQQYGDLPFTFGCGTKVEIKSGGGGSEVQLVESGGGLVQPGGSLKLSCAASGFTFNKYAMNWVRQAPGKGLEWVARIRSKYNNYATYYADSVKDRFTISRDDSKNTAYLQMNNLKTEDTAVYYCVRHGNFGNSYISYWAYWGQGTLVTVSSGGGGSGGGGSGGGGSQTVVTQEPSLTVSPGGTVTLTCGSSTGAVTSGNYPNWVQQKPGQAPRGLIGGTKFLAPGTPARFSGSLLGGKAALTLSGVQPEDEAEYYCVLWYSNRWVFGGGTKLTVLGGGGDKTHTCPPCPAPELLGGPSVFLFPPKPKDTLMISRTPEVTCVVVDVSHEDPEVKFNWYVDGVEVHNAKTKPCEEQYGSTYRCVSVLTVLHQDWLNGKEYKCKVSNKALPAPIEKTISKAKGQPREPQVYTLPPSREEMTKNQVSLTCLVKGFYPSDIAVEWESNGQPENNYKTTPPVLDSDGSFFLYSKLTVDKSRWQQGNVFSCSVMHEALHNHYTQKSLSLSPGGGGSGGGGSGGGGSGGGGSGGGGSGGGGSDKTHTCPPCPAPELLGGPSVFLFPPKPKDTLMISRTPEVTCVVVDVSHEDPEVKFNWYVDGVEVHNAKTKPCEEQYGSTYRCVSVLTVLHQDWLNGKEYKCKVSNKALPAPIEKTISKAKGQPREPQVYTLPPSREEMTKNQVSLTCLVKGFYPSDIAVEWESNGQPENNYKTTPPVLDSDGSFFLYSKLTVDKSRWQQGNVFSCSVMHEALHNHYTQKSLSLSPGK

SEQ ID NO: 1676 - protein, 984 aa, Artificial Sequence
  Synthetic peptide
EVQLLESGGGMVQPGGSLRLSCAASGFTFSSYAMSWVRQAPGKGLEWVSAISGSGGRTFYADSVEGRFTISRDNSKNTLYLQMNSLRAEDTAVYYCTKHDYSNYPYFDYWGQGTLVTVSSGGGGSGGGGSGGGGSEIVLTQSPGTLSLSPGERATLSCRASQSVRSSYLAWYQQKPGQAPRLLIYGASSRATGIPDRFSGSGSGTDFTLTISRLEPEDFAVYYCQQYGDLPFTFGPGTKVDIKSGGGGSEVQLVESGGGLVQPGGSLKLSCAASGFTFNKYAMNWVRQAPGKGLEWVARIRSKYNNYATYYADSVKDRFTISRDDSKNTAYLQMNNLKTEDTAVYYCVRHGNFGNSYISYWAYWGQGTLVTVSSGGGGSGGGGSGGGGSQTVVTQEPSLTVSPGGTVTLTCGSSTGAVTSGNYPNWVQQKPGQAPRGLIGGTKFLAPGTPARFSGSLLGGKAALTLSGVQPEDEAEYYCVLWYSNRWVFGGGTKLTVLGGGGDKTHTCPPCPAPELLGGPSVFLFPPKPKDTLMISRTPEVTCVVVDVSHEDPEVKFNWYVDGVEVHNAKTKPCEEQYGSTYRCVSVLTVLHQDWLNGKEYKCKVSNKALPAPIEKTISKAKGQPREPQVYTLPPSREEMTKNQVSLTCLVKGFYPSDIAVEWESNGQPENNYKTTPPVLDSDGSFFLYSKLTVDKSRWQQGNVFSCSVMHEALHNHYTQKSLSLSPGGGGSGGGGSGGGGSGGGGSGGGGSGGGGSDKTHTCPPCPAPELLGGPSVFLFPPKPKDTLMISRTPEVTCVVVDVSHEDPEVKFNWYVDGVEVHNAKTKPCEEQYGSTYRCVSVLTVLHQDWLNGKEYKCKVSNKALPAPIEKTISKAKGQPREPQVYTLPPSREEMTKNQVSLTCLVKGFYPSDIAVEWESNGQPENNYKTTPPVLDSDGSFFLYSKLTVDKSRWQQGNVFSCSVMHEALHNHYTQKSLSLSPGK

SEQ ID NO: 1677 - protein, 984 aa, Artificial Sequence
  Synthetic peptide
EVQLLESGGGMVQPGGSLRLSCAASGFTFSSYAMSWVRQAPGKCLEWVSAISGSGGRTFYADSVEGRFTISRDNSKNTLYLQMNSLRAEDTAVYYCTKHDYSNYPYFDYWGQGTLVTVSSGGGGSGGGGSGGGGSEIVLTQSPGTLSLSPGERATLSCRASQSVRSSYLAWYQQKPGQAPRLLIYGASSRATGIPDRFSGSGSGTDFTLTISRLEPEDFAVYYCQQYGDLPFTFGCGTKVDIKSGGGGSEVQLVESGGGLVQPGGSLKLSCAASGFTFNKYAMNWVRQAPGKGLEWVARIRSKYNNYATYYADSVKDRFTISRDDSKNTAYLQMNNLKTEDTAVYYCVRHGNFGNSYISYWAYWGQGTLVTVSSGGGGSGGGGSGGGGSQTVVTQEPSLTVSPGGTVTLTCGSSTGAVTSGNYPNWVQQKPGQAPRGLIGGTKFLAPGTPARFSGSLLGGKAALTLSGVQPEDEAEYYCVLWYSNRWVFGGGTKLTVLGGGGDKTHTCPPCPAPELLGGPSVFLFPPKPKDTLMISRTPEVTCVVVDVSHEDPEVKFNWYVDGVEVHNAKTKPCEEQYGSTYRCVSVLTVLHQDWLNGKEYKCKVSNKALPAPIEKTISKAKGQPREPQVYTLPPSREEMTKNQVSLTCLVKGFYPSDIAVEWESNGQPENNYKTTPPVLDSDGSFFLYSKLTVDKSRWQQGNVFSCSVMHEALHNHYTQKSLSLSPGGGGSGGGGSGGGGSGGGGSGGGGSGGGGSDKTHTCPPCPAPELLGGPSVFLFPPKPKDTLMISRTPEVTCVVVDVSHEDPEVKFNWYVDGVEVHNAKTKPCEEQYGSTYRCVSVLTVLHQDWLNGKEYKCKVSNKALPAPIEKTISKAKGQPREPQVYTLPPSREEMTKNQVSLTCLVKGFYPSDIAVEWESNGQPENNYKTTPPVLDSDGSFFLYSKLTVDKSRWQQGNVFSCSVMHEALHNHYTQKSLSLSPGK

SEQ ID NO: 1678 - protein, 984 aa, Artificial Sequence
  Synthetic peptide
EVQLLESGGGLVQPGGSLRLSCAASGFTFSTYAMSWVRQAPGKGLEWVSLISGSGGRTYYADSVKGRFTISRDNSKNTLYLQMNSLRAEDTAVYYCAKHDYSNYPYFDYWGQGTLVTVSSGGGGSGGGGSGGGGSEIVLTQSPGTLSLSPGERATLSCRASQGVRSSYLAWYQQKPGQAPRLLIYGASSRATGIPDRFSGSGSGTDFTLTINRLEPEDFAVYYCQQYGSSPPTFGGGTKVDIKSGGGGSEVQLVESGGGLVQPGGSLKLSCAASGFTFNKYAMNWVRQAPGKGLEWVARIRSKYNNYATYYADSVKDRFTISRDDSKNTAYLQMNNLKTEDTAVYYCVRHGNFGNSYISYWAYWGQGTLVTVSSGGGGSGGGGSGGGGSQTVVTQEPSLTVSPGGTVTLTCGSSTGAVTSGNYPNWVQQKPGQAPRGLIGGTKFLAPGTPARFSGSLLGGKAALTLSGVQPEDEAEYYCVLWYSNRWVFGGGTKLTVLGGGGDKTHTCPPCPAPELLGGPSVFLFPPKPKDTLMISRTPEVTCVVVDVSHEDPEVKFNWYVDGVEVHNAKTKPCEEQYGSTYRCVSVLTVLHQDWLNGKEYKCKVSNKALPAPIEKTISKAKGQPREPQVYTLPPSREEMTKNQVSLTCLVKGFYPSDIAVEWESNGQPENNYKTTPPVLDSDGSFFLYSKLTVDKSRWQQGNVFSCSVMHEALHNHYTQKSLSLSPGGGGSGGGGSGGGGSGGGGSGGGGSGGGGSDKTHTCPPCPAPELLGGPSVFLFPPKPKDTLMISRTPEVTCVVVDVSHEDPEVKFNWYVDGVEVHNAKTKPCEEQYGSTYRCVSVLTVLHQDWLNGKEYKCKVSNKALPAPIEKTISKAKGQPREPQVYTLPPSREEMTKNQVSLTCLVKGFYPSDIAVEWESNGQPENNYKTTPPVLDSDGSFFLYSKLTVDKSRWQQGNVFSCSVMHEALHNHYTQKSLSLSPGK

SEQ ID NO: 1679 - protein, 984 aa, Artificial Sequence
  Synthetic peptide
EVQLLESGGGLVQPGGSLRLSCAASGFTFSTYAMSWVRQAPGKCLEWVSLISGSGGRTYYADSVKGRFTISRDNSKNTLYLQMNSLRAEDTAVYYCAKHDYSNYPYFDYWGQGTLVTVSSGGGGSGGGGSGGGGSEIVLTQSPGTLSLSPGERATLSCRASQGVRSSYLAWYQQKPGQAPRLLIYGASSRATGIPDRFSGSGSGTDFTLTINRLEPEDFAVYYCQQYGSSPPTFGCGTKVDIKSGGGGSEVQLVESGGGLVQPGGSLKLSCAASGFTFNKYAMNWVRQAPGKGLEWVARIRSKYNNYATYYADSVKDRFTISRDDSKNTAYLQMNNLKTEDTAVYYCVRHGNFGNSYISYWAYWGQGTLVTVSSGGGGSGGGGSGGGGSQTVVTQEPSLTVSPGGTVTLTCGSSTGAVTSGNYPNWVQQKPGQAPRGLIGGTKFLAPGTPARFSGSLLGGKAALTLSGVQPEDEAEYYCVLWYSNRWVFGGGTKLTVLGGGGDKTHTCPPCPAPELLGGPSVFLFPPKPKDTLMISRTPEVTCVVVDVSHEDPEVKFNWYVDGVEVHNAKTKPCEEQYGSTYRCVSVLTVLHQDWLNGKEYKCKVSNKALPAPIEKTISKAKGQPREPQVYTLPPSREEMTKNQVSLTCLVKGFYPSDIAVEWESNGQPENNYKTTPPVLDSDGSFFLYSKLTVDKSRWQQGNVFSCSVMHEALHNHYTQKSLSLSPGGGGSGGGGSGGGGSGGGGSGGGGSGGGGSDKTHTCPPCPAPELLGGPSVFLFPPKPKDTLMISRTPEVTCVVVDVSHEDPEVKFNWYVDGVEVHNAKTKPCEEQYGSTYRCVSVLTVLHQDWLNGKEYKCKVSNKALPAPIEKTISKAKGQPREPQVYTLPPSREEMTKNQVSLTCLVKGFYPSDIAVEWESNGQPENNYKTTPPVLDSDGSFFLYSKLTVDKSRWQQGNVFSCSVMHEALHNHYTQKSLSLSPGK

SEQ ID NO: 1680 - protein, 984 aa, Artificial Sequence
  Synthetic peptide
EVQLLESGGGVVQPGRSLRLSCAASGFTFSSYAMSWVRQAPGKGLEWVSAISGSGGRTFYADSVEGRFTISRDNSKNTLYLQMNSLRAEDTAVYYCAKHDYSNYPYFDYWGQGTLVTVSSGGGGSGGGGSGGGGSEIVLTQSPGTLSLSPGERATLSCRASQSVRSNYLAWYQQKPGQAPRLLIYGASSRATGIPDRFSGSGSGTDFTLTINRLEPEDFAVYYCQQYGSSPPTFGGGTKVDIKSGGGGSEVQLVESGGGLVQPGGSLKLSCAASGFTFNKYAMNWVRQAPGKGLEWVARIRSKYNNYATYYADSVKDRFTISRDDSKNTAYLQMNNLKTEDTAVYYCVRHGNFGNSYISYWAYWGQGTLVTVSSGGGGSGGGGSGGGGSQTVVTQEPSLTVSPGGTVTLTCGSSTGAVTSGNYPNWVQQKPGQAPRGLIGGTKFLAPGTPARFSGSLLGGKAALTLSGVQPEDEAEYYCVLWYSNRWVFGGGTKLTVLGGGGDKTHTCPPCPAPELLGGPSVFLFPPKPKDTLMISRTPEVTCVVVDVSHEDPEVKFNWYVDGVEVHNAKTKPCEEQYGSTYRCVSVLTVLHQDWLNGKEYKCKVSNKALPAPIEKTISKAKGQPREPQVYTLPPSREEMTKNQVSLTCLVKGFYPSDIAVEWESNGQPENNYKTTPPVLDSDGSFFLYSKLTVDKSRWQQGNVFSCSVMHEALHNHYTQKSLSLSPGGGGSGGGGSGGGGSGGGGSGGGGSGGGGSDKTHTCPPCPAPELLGGPSVFLFPPKPKDTLMISRTPEVTCVVVDVSHEDPEVKFNWYVDGVEVHNAKTKPCEEQYGSTYRCVSVLTVLHQDWLNGKEYKCKVSNKALPAPIEKTISKAKGQPREPQVYTLPPSREEMTKNQVSLTCLVKGFYPSDIAVEWESNGQPENNYKTTPPVLDSDGSFFLYSKLTVDKSRWQQGNVFSCSVMHEALHNHYTQKSLSLSPGK

SEQ ID NO: 1681 - protein, 984 aa, Artificial Sequence
  Synthetic peptide
EVQLLESGGGVVQPGRSLRLSCAASGFTFSSYAMSWVRQAPGKCLEWVSAISGSGGRTFYADSVEGRFTISRDNSKNTLYLQMNSLRAEDTAVYYCAKHDYSNYPYFDYWGQGTLVTVSSGGGGSGGGGSGGGGSEIVLTQSPGTLSLSPGERATLSCRASQSVRSNYLAWYQQKPGQAPRLLIYGASSRATGIPDRFSGSGSGTDFTLTINRLEPEDFAVYYCQQYGSSPPTFGCGTKVDIKSGGGGSEVQLVESGGGLVQPGGSLKLSCAASGFTFNKYAMNWVRQAPGKGLEWVARIRSKYNNYATYYADSVKDRFTISRDDSKNTAYLQMNNLKTEDTAVYYCVRHGNFGNSYISYWAYWGQGTLVTVSSGGGGSGGGGSGGGGSQTVVTQEPSLTVSPGGTVTLTCGSSTGAVTSGNYPNWVQQKPGQAPRGLIGGTKFLAPGTPARFSGSLLGGKAALTLSGVQPEDEAEYYCVLWYSNRWVFGGGTKLTVLGGGGDKTHTCPPCPAPELLGGPSVFLFPPKPKDTLMISRTPEVTCVVVDVSHEDPEVKFNWYVDGVEVHNAKTKPCEEQYGSTYRCVSVLTVLHQDWLNGKEYKCKVSNKALPAPIEKTISKAKGQPREPQVYTLPPSREEMTKNQVSLTCLVKGFYPSDIAVEWESNGQPENNYKTTPPVLDSDGSFFLYSKLTVDKSRWQQGNVFSCSVMHEALHNHYTQKSLSLSPGGGGSGGGGSGGGGSGGGGSGGGGSGGGGSDKTHTCPPCPAPELLGGPSVFLFPPKPKDTLMISRTPEVTCVVVDVSHEDPEVKFNWYVDGVEVHNAKTKPCEEQYGSTYRCVSVLTVLHQDWLNGKEYKCKVSNKALPAPIEKTISKAKGQPREPQVYTLPPSREEMTKNQVSLTCLVKGFYPSDIAVEWESNGQPENNYKTTPPVLDSDGSFFLYSKLTVDKSRWQQGNVFSCSVMHEALHNHYTQKSLSLSPGK

SEQ ID NO: 1682 - protein, 983 aa, Artificial Sequence
  Synthetic peptide
EVQLLESGGGLVQPGGSLRLSCAASGFTFSSYAMSWVRQAPGKGLEWVSVISDSGGITDFADSVKGRFTISRDNSRNTLYLQMNSLRAEDTAVYFCARHDYSNYFFFDYWGQGTLVTVSSGGGGSGGGGSGGGGSDIQMTQSPSSLSASVGDRVTITCRASQGISNYLAWYQQKPGKVPKLLIYAASILQSGVPSKFSGSGSGTDFTLTISSLQPEDFAIYYCQQYFAYPITFGQGTRLEIKSGGGGSEVQLVESGGGLVQPGGSLKLSCAASGFTFNKYAMNWVRQAPGKGLEWVARIRSKYNNYATYYADSVKDRFTISRDDSKNTAYLQMNNLKTEDTAVYYCVRHGNFGNSYISYWAYWGQGTLVTVSSGGGGSGGGGSGGGGSQTVVTQEPSLTVSPGGTVTLTCGSSTGAVTSGNYPNWVQQKPGQAPRGLIGGTKFLAPGTPARFSGSLLGGKAALTLSGVQPEDEAEYYCVLWYSNRWVFGGGTKLTVLGGGGDKTHTCPPCPAPELLGGPSVFLFPPKPKDTLMISRTPEVTCVVVDVSHEDPEVKFNWYVDGVEVHNAKTKPCEEQYGSTYRCVSVLTVLHQDWLNGKEYKCKVSNKALPAPIEKTISKAKGQPREPQVYTLPPSREEMTKNQVSLTCLVKGFYPSDIAVEWESNGQPENNYKTTPPVLDSDGSFFLYSKLTVDKSRWQQGNVFSCSVMHEALHNHYTQKSLSLSPGGGGSGGGGSGGGGSGGGGSGGGGSGGGGSDKTHTCPPCPAPELLGGPSVFLFPPKPKDTLMISRTPEVTCVVVDVSHEDPEVKFNWYVDGVEVHNAKTKPCEEQYGSTYRCVSVLTVLHQDWLNGKEYKCKVSNKALPAPIEKTISKAKGQPREPQVYTLPPSREEMTKNQVSLTCLVKGFYPSDIAVEWESNGQPENNYKTTPPVLDSDGSFFLYSKLTVDKSRWQQGNVFSCSVMHEALHNHYTQKSLSLSPGK

SEQ ID NO: 1683 - protein, 983 aa, Artificial Sequence
  Synthetic peptide
EVQLLESGGGLVQPGGSLRLSCAASGFTFSSYAMSWVRQAPGKCLEWVSVISDSGGITDFADSVKGRFTISRDNSRNTLYLQMNSLRAEDTAVYFCARHDYSNYFFFDYWGQGTLVTVSSGGGGSGGGGSGGGGSDIQMTQSPSSLSASVGDRVTITCRASQGISNYLAWYQQKPGKVPKLLIYAASILQSGVPSKFSGSGSGTDFTLTISSLQPEDFAIYYCQQYFAYPITFGCGTRLEIKSGGGGSEVQLVESGGGLVQPGGSLKLSCAASGFTFNKYAMNWVRQAPGKGLEWVARIRSKYNNYATYYADSVKDRFTISRDDSKNTAYLQMNNLKTEDTAVYYCVRHGNFGNSYISYWAYWGQGTLVTVSSGGGGSGGGGSGGGGSQTVVTQEPSLTVSPGGTVTLTCGSSTGAVTSGNYPNWVQQKPGQAPRGLIGGTKFLAPGTPARFSGSLLGGKAALTLSGVQPEDEAEYYCVLWYSNRWVFGGGTKLTVLGGGGDKTHTCPPCPAPELLGGPSVFLFPPKPKDTLMISRTPEVTCVVVDVSHEDPEVKFNWYVDGVEVHNAKTKPCEEQYGSTYRCVSVLTVLHQDWLNGKEYKCKVSNKALPAPIEKTISKAKGQPREPQVYTLPPSREEMTKNQVSLTCLVKGFYPSDIAVEWESNGQPENNYKTTPPVLDSDGSFFLYSKLTVDKSRWQQGNVFSCSVMHEALHNHYTQKSLSLSPGGGGSGGGGSGGGGSGGGGSGGGGSGGGGSDKTHTCPPCPAPELLGGPSVFLFPPKPKDTLMISRTPEVTCVVVDVSHEDPEVKFNWYVDGVEVHNAKTKPCEEQYGSTYRCVSVLTVLHQDWLNGKEYKCKVSNKALPAPIEKTISKAKGQPREPQVYTLPPSREEMTKNQVSLTCLVKGFYPSDIAVEWESNGQPENNYKTTPPVLDSDGSFFLYSKLTVDKSRWQQGNVFSCSVMHEALHNHYTQKSLSLSPGK

SEQ ID NO: 1684 - protein, 984 aa, Artificial Sequence
  Synthetic peptide
EVQLLESGGGMVQPGGSLRLSCAASGFTFSSYAMSWVRQAPGKGLEWVSAISGSGGRTFYADSVEGRFTISRDNSKNTLYLQMNSLRAEDTAVYYCAKHDYSNYPYFDYWGQGTLVTVSSGGGGSGGGGSGGGGSEIVLTQSPGTLSLSPGERATLSCRASQSVRSSYLAWYQQKPGQAPRLLIYGASSRATGIPDRFSGSGSGTDFTLTISRLEPEDFAVYFCQQYGSSPPTFGGGTRLEIKSGGGGSEVQLVESGGGLVQPGGSLKLSCAASGFTFNKYAMNWVRQAPGKGLEWVARIRSKYNNYATYYADSVKDRFTISRDDSKNTAYLQMNNLKTEDTAVYYCVRHGNFGNSYISYWAYWGQGTLVTVSSGGGGSGGGGSGGGGSQTVVTQEPSLTVSPGGTVTLTCGSSTGAVTSGNYPNWVQQKPGQAPRGLIGGTKFLAPGTPARFSGSLLGGKAALTLSGVQPEDEAEYYCVLWYSNRWVFGGGTKLTVLGGGGDKTHTCPPCPAPELLGGPSVFLFPPKPKDTLMISRTPEVTCVVVDVSHEDPEVKFNWYVDGVEVHNAKTKPCEEQYGSTYRCVSVLTVLHQDWLNGKEYKCKVSNKALPAPIEKTISKAKGQPREPQVYTLPPSREEMTKNQVSLTCLVKGFYPSDIAVEWESNGQPENNYKTTPPVLDSDGSFFLYSKLTVDKSRWQQGNVFSCSVMHEALHNHYTQKSLSLSPGGGGSGGGGSGGGGSGGGGSGGGGSGGGGSDKTHTCPPCPAPELLGGPSVFLFPPKPKDTLMISRTPEVTCVVVDVSHEDPEVKFNWYVDGVEVHNAKTKPCEEQYGSTYRCVSVLTVLHQDWLNGKEYKCKVSNKALPAPIEKTISKAKGQPREPQVYTLPPSREEMTKNQVSLTCLVKGFYPSDIAVEWESNGQPENNYKTTPPVLDSDGSFFLYSKLTVDKSRWQQGNVFSCSVMHEALHNHYTQKSLSLSPGK

SEQ ID NO: 1685 - protein, 984 aa, Artificial Sequence
  Synthetic peptide
EVQLLESGGGMVQPGGSLRLSCAASGFTFSSYAMSWVRQAPGKCLEWVSAISGSGGRTFYADSVEGRFTISRDNSKNTLYLQMNSLRAEDTAVYYCAKHDYSNYPYFDYWGQGTLVTVSSGGGGSGGGGSGGGGSEIVLTQSPGTLSLSPGERATLSCRASQSVRSSYLAWYQQKPGQAPRLLIYGASSRATGIPDRFSGSGSGTDFTLTISRLEPEDFAVYFCQQYGSSPPTFGCGTRLEIKSGGGGSEVQLVESGGGLVQPGGSLKLSCAASGFTFNKYAMNWVRQAPGKGLEWVARIRSKYNNYATYYADSVKDRFTISRDDSKNTAYLQMNNLKTEDTAVYYCVRHGNFGNSYISYWAYWGQGTLVTVSSGGGGSGGGGSGGGGSQTVVTQEPSLTVSPGGTVTLTCGSSTGAVTSGNYPNWVQQKPGQAPRGLIGGTKFLAPGTPARFSGSLLGGKAALTLSGVQPEDEAEYYCVLWYSNRWVFGGGTKLTVLGGGGDKTHTCPPCPAPELLGGPSVFLFPPKPKDTLMISRTPEVTCVVVDVSHEDPEVKFNWYVDGVEVHNAKTKPCEEQYGSTYRCVSVLTVLHQDWLNGKEYKCKVSNKALPAPIEKTISKAKGQPREPQVYTLPPSREEMTKNQVSLTCLVKGFYPSDIAVEWESNGQPENNYKTTPPVLDSDGSFFLYSKLTVDKSRWQQGNVFSCSVMHEALHNHYTQKSLSLSPGGGGSGGGGSGGGGSGGGGSGGGGSGGGGSDKTHTCPPCPAPELLGGPSVFLFPPKPKDTLMISRTPEVTCVVVDVSHEDPEVKFNWYVDGVEVHNAKTKPCEEQYGSTYRCVSVLTVLHQDWLNGKEYKCKVSNKALPAPIEKTISKAKGQPREPQVYTLPPSREEMTKNQVSLTCLVKGFYPSDIAVEWESNGQPENNYKTTPPVLDSDGSFFLYSKLTVDKSRWQQGNVFSCSVMHEALHNHYTQKSLSLSPGK

SEQ ID NO: 1686 - protein, 984 aa, Artificial Sequence
  Synthetic peptide
EVQLLESGGGLVQPGGSLRLSCAASGFTFSIYAMSWVRQAPGKGLEWVSAIGDSGGSTFYADSVKGRFTISRDNSKNTLYLQMNSLRAEDTAVYYCAKHDYSNYPYFDYWGQGTLVTVSSGGGGSGGGGSGGGGSEIVLTQSPGTLSLSPGERATLSCRASQSVRSSYVAWYQQKPGQAPRLLIYGASSRATGIPDRFSGSGSGTDFTLTISRLEPEDFAVYYCQQYGDLPFTFGPGTRLEIKSGGGGSEVQLVESGGGLVQPGGSLKLSCAASGFTFNKYAMNWVRQAPGKGLEWVARIRSKYNNYATYYADSVKDRFTISRDDSKNTAYLQMNNLKTEDTAVYYCVRHGNFGNSYISYWAYWGQGTLVTVSSGGGGSGGGGSGGGGSQTVVTQEPSLTVSPGGTVTLTCGSSTGAVTSGNYPNWVQQKPGQAPRGLIGGTKFLAPGTPARFSGSLLGGKAALTLSGVQPEDEAEYYCVLWYSNRWVFGGGTKLTVLGGGGDKTHTCPPCPAPELLGGPSVFLFPPKPKDTLMISRTPEVTCVVVDVSHEDPEVKFNWYVDGVEVHNAKTKPCEEQYGSTYRCVSVLTVLHQDWLNGKEYKCKVSNKALPAPIEKTISKAKGQPREPQVYTLPPSREEMTKNQVSLTCLVKGFYPSDIAVEWESNGQPENNYKTTPPVLDSDGSFFLYSKLTVDKSRWQQGNVFSCSVMHEALHNHYTQKSLSLSPGGGGSGGGGSGGGGSGGGGSGGGGSGGGGSDKTHTCPPCPAPELLGGPSVFLFPPKPKDTLMISRTPEVTCVVVDVSHEDPEVKFNWYVDGVEVHNAKTKPCEEQYGSTYRCVSVLTVLHQDWLNGKEYKCKVSNKALPAPIEKTISKAKGQPREPQVYTLPPSREEMTKNQVSLTCLVKGFYPSDIAVEWESNGQPENNYKTTPPVLDSDGSFFLYSKLTVDKSRWQQGNVFSCSVMHEALHNHYTQKSLSLSPGK

SEQ ID NO: 1687 - protein, 984 aa, Artificial Sequence
  Synthetic peptide
EVQLLESGGGLVQPGGSLRLSCAASGFTFSIYAMSWVRQAPGKCLEWVSAIGDSGGSTFYADSVKGRFTISRDNSKNTLYLQMNSLRAEDTAVYYCAKHDYSNYPYFDYWGQGTLVTVSSGGGGSGGGGSGGGGSEIVLTQSPGTLSLSPGERATLSCRASQSVRSSYVAWYQQKPGQAPRLLIYGASSRATGIPDRFSGSGSGTDFTLTISRLEPEDFAVYYCQQYGDLPFTFGCGTRLEIKSGGGGSEVQLVESGGGLVQPGGSLKLSCAASGFTFNKYAMNWVRQAPGKGLEWVARIRSKYNNYATYYADSVKDRFTISRDDSKNTAYLQMNNLKTEDTAVYYCVRHGNFGNSYISYWAYWGQGTLVTVSSGGGGSGGGGSGGGGSQTVVTQEPSLTVSPGGTVTLTCGSSTGAVTSGNYPNWVQQKPGQAPRGLIGGTKFLAPGTPARFSGSLLGGKAALTLSGVQPEDEAEYYCVLWYSNRWVFGGGTKLTVLGGGGDKTHTCPPCPAPELLGGPSVFLFPPKPKDTLMISRTPEVTCVVVDVSHEDPEVKFNWYVDGVEVHNAKTKPCEEQYGSTYRCVSVLTVLHQDWLNGKEYKCKVSNKALPAPIEKTISKAKGQPREPQVYTLPPSREEMTKNQVSLTCLVKGFYPSDIAVEWESNGQPENNYKTTPPVLDSDGSFFLYSKLTVDKSRWQQGNVFSCSVMHEALHNHYTQKSLSLSPGGGGSGGGGSGGGGSGGGGSGGGGSGGGGSDKTHTCPPCPAPELLGGPSVFLFPPKPKDTLMISRTPEVTCVVVDVSHEDPEVKFNWYVDGVEVHNAKTKPCEEQYGSTYRCVSVLTVLHQDWLNGKEYKCKVSNKALPAPIEKTISKAKGQPREPQVYTLPPSREEMTKNQVSLTCLVKGFYPSDIAVEWESNGQPENNYKTTPPVLDSDGSFFLYSKLTVDKSRWQQGNVFSCSVMHEALHNHYTQKSLSLSPGK

SEQ ID NO: 1688 - protein, 988 aa, Artificial Sequence
  Synthetic peptide
QVQLQESGPGLVKPSQTLSLTCTVSGGSISSSSYYWGWIRQPPGKGLEWIGSIYHSGGTYFNPSLKSRVTISVDTSKNQFSLKLSSVTAADTAVYYCARHYEILTGYYPDVFDIWGQGTMVTVSSGGGGSGGGGSGGGGSDIQMTQSPSSLSASVGDRVTITCRASQSISSYLNWYQQKPGKAPKLLIYAASNLQSGVSSRFSGSGSGTDFTLTISSLQPEDFATYYCQQSFSSPRTFGQGTKVEIKSGGGGSEVQLVESGGGLVQPGGSLKLSCAASGFTFNKYAMNWVRQAPGKGLEWVARIRSKYNNYATYYADSVKDRFTISRDDSKNTAYLQMNNLKTEDTAVYYCVRHGNFGNSYISYWAYWGQGTLVTVSSGGGGSGGGGSGGGGSQTVVTQEPSLTVSPGGTVTLTCGSSTGAVTSGNYPNWVQQKPGQAPRGLIGGTKFLAPGTPARFSGSLLGGKAALTLSGVQPEDEAEYYCVLWYSNRWVFGGGTKLTVLGGGGDKTHTCPPCPAPELLGGPSVFLFPPKPKDTLMISRTPEVTCVVVDVSHEDPEVKFNWYVDGVEVHNAKTKPCEEQYGSTYRCVSVLTVLHQDWLNGKEYKCKVSNKALPAPIEKTISKAKGQPREPQVYTLPPSREEMTKNQVSLTCLVKGFYPSDIAVEWESNGQPENNYKTTPPVLDSDGSFFLYSKLTVDKSRWQQGNVFSCSVMHEALHNHYTQKSLSLSPGGGGSGGGGSGGGGSGGGGSGGGGSGGGGSDKTHTCPPCPAPELLGGPSVFLFPPKPKDTLMISRTPEVTCVVVDVSHEDPEVKFNWYVDGVEVHNAKTKPCEEQYGSTYRCVSVLTVLHQDWLNGKEYKCKVSNKALPAPIEKTISKAKGQPREPQVYTLPPSREEMTKNQVSLTCLVKGFYPSDIAVEWESNGQPENNYKTTPPVLDSDGSFFLYSKLTVDKSRWQQGNVFSCSVMHEALHNHYTQKSLSLSPGK

SEQ ID NO: 1689 - protein, 988 aa, Artificial Sequence
  Synthetic peptide
QVQLQESGPGLVKPSQTLSLTCTVSGGSISSSSYYWGWIRQPPGKCLEWIGSIYHSGGTYFNPSLKSRVTISVDTSKNQFSLKLSSVTAADTAVYYCARHYEILTGYYPDVFDIWGQGTMVTVSSGGGGSGGGGSGGGGSDIQMTQSPSSLSASVGDRVTITCRASQSISSYLNWYQQKPGKAPKLLIYAASNLQSGVSSRFSGSGSGTDFTLTISSLQPEDFATYYCQQSFSSPRTFGCGTKVEIKSGGGGSEVQLVESGGGLVQPGGSLKLSCAASGFTFNKYAMNWVRQAPGKGLEWVARIRSKYNNYATYYADSVKDRFTISRDDSKNTAYLQMNNLKTEDTAVYYCVRHGNFGNSYISYWAYWGQGTLVTVSSGGGGSGGGGSGGGGSQTVVTQEPSLTVSPGGTVTLTCGSSTGAVTSGNYPNWVQQKPGQAPRGLIGGTKFLAPGTPARFSGSLLGGKAALTLSGVQPEDEAEYYCVLWYSNRWVFGGGTKLTVLGGGGDKTHTCPPCPAPELLGGPSVFLFPPKPKDTLMISRTPEVTCVVVDVSHEDPEVKFNWYVDGVEVHNAKTKPCEEQYGSTYRCVSVLTVLHQDWLNGKEYKCKVSNKALPAPIEKTISKAKGQPREPQVYTLPPSREEMTKNQVSLTCLVKGFYPSDIAVEWESNGQPENNYKTTPPVLDSDGSFFLYSKLTVDKSRWQQGNVFSCSVMHEALHNHYTQKSLSLSPGGGGSGGGGSGGGGSGGGGSGGGGSGGGGSDKTHTCPPCPAPELLGGPSVFLFPPKPKDTLMISRTPEVTCVVVDVSHEDPEVKFNWYVDGVEVHNAKTKPCEEQYGSTYRCVSVLTVLHQDWLNGKEYKCKVSNKALPAPIEKTISKAKGQPREPQVYTLPPSREEMTKNQVSLTCLVKGFYPSDIAVEWESNGQPENNYKTTPPVLDSDGSFFLYSKLTVDKSRWQQGNVFSCSVMHEALHNHYTQKSLSLSPGK

SEQ ID NO: 1690 - protein, 983 aa, Artificial Sequence
  Synthetic peptide
EVQLVESGGGLVKPGGSLRLSCAASGFTFSSYSMNWVRQAPGKGLEWVSYISSSGGYIYYADSVKGRFTISRDNAKNSLYLQMNSLRAEDAAVYYCSRGDYSNYAYFDYWGQGTLVTVSSGGGGSGGGGSGGGGSDIQMTQSPSSLSASVGDRVTITCRASQGISNYLAWYQQKPGKVPKLLIYAASTLQSGVPSRFSGSGSGTDFTLTISSLQAEDVAVYYCQQYYSTPLTFGGGTKVEIKSGGGGSEVQLVESGGGLVQPGGSLKLSCAASGFTFNKYAMNWVRQAPGKGLEWVARIRSKYNNYATYYADSVKDRFTISRDDSKNTAYLQMNNLKTEDTAVYYCVRHGNFGNSYISYWAYWGQGTLVTVSSGGGGSGGGGSGGGGSQTVVTQEPSLTVSPGGTVTLTCGSSTGAVTSGNYPNWVQQKPGQAPRGLIGGTKFLAPGTPARFSGSLLGGKAALTLSGVQPEDEAEYYCVLWYSNRWVFGGGTKLTVLGGGGDKTHTCPPCPAPELLGGPSVFLFPPKPKDTLMISRTPEVTCVVVDVSHEDPEVKFNWYVDGVEVHNAKTKPCEEQYGSTYRCVSVLTVLHQDWLNGKEYKCKVSNKALPAPIEKTISKAKGQPREPQVYTLPPSREEMTKNQVSLTCLVKGFYPSDIAVEWESNGQPENNYKTTPPVLDSDGSFFLYSKLTVDKSRWQQGNVFSCSVMHEALHNHYTQKSLSLSPGGGGSGGGGSGGGGSGGGGSGGGGSGGGGSDKTHTCPPCPAPELLGGPSVFLFPPKPKDTLMISRTPEVTCVVVDVSHEDPEVKFNWYVDGVEVHNAKTKPCEEQYGSTYRCVSVLTVLHQDWLNGKEYKCKVSNKALPAPIEKTISKAKGQPREPQVYTLPPSREEMTKNQVSLTCLVKGFYPSDIAVEWESNGQPENNYKTTPPVLDSDGSFFLYSKLTVDKSRWQQGNVFSCSVMHEALHNHYTQKSLSLSPGK

SEQ ID NO: 1691 - protein, 983 aa, Artificial Sequence
  Synthetic peptide
EVQLVESGGGLVKPGGSLRLSCAASGFTFSSYSMNWVRQAPGKCLEWVSYISSSGGYIYYADSVKGRFTISRDNAKNSLYLQMNSLRAEDAAVYYCSRGDYSNYAYFDYWGQGTLVTVSSGGGGSGGGGSGGGGSDIQMTQSPSSLSASVGDRVTITCRASQGISNYLAWYQQKPGKVPKLLIYAASTLQSGVPSRFSGSGSGTDFTLTISSLQAEDVAVYYCQQYYSTPLTFGCGTKVEIKSGGGGSEVQLVESGGGLVQPGGSLKLSCAASGFTFNKYAMNWVRQAPGKGLEWVARIRSKYNNYATYYADSVKDRFTISRDDSKNTAYLQMNNLKTEDTAVYYCVRHGNFGNSYISYWAYWGQGTLVTVSSGGGGSGGGGSGGGGSQTVVTQEPSLTVSPGGTVTLTCGSSTGAVTSGNYPNWVQQKPGQAPRGLIGGTKFLAPGTPARFSGSLLGGKAALTLSGVQPEDEAEYYCVLWYSNRWVFGGGTKLTVLGGGGDKTHTCPPCPAPELLGGPSVFLFPPKPKDTLMISRTPEVTCVVVDVSHEDPEVKFNWYVDGVEVHNAKTKPCEEQYGSTYRCVSVLTVLHQDWLNGKEYKCKVSNKALPAPIEKTISKAKGQPREPQVYTLPPSREEMTKNQVSLTCLVKGFYPSDIAVEWESNGQPENNYKTTPPVLDSDGSFFLYSKLTVDKSRWQQGNVFSCSVMHEALHNHYTQKSLSLSPGGGGSGGGGSGGGGSGGGGSGGGGSGGGGSDKTHTCPPCPAPELLGGPSVFLFPPKPKDTLMISRTPEVTCVVVDVSHEDPEVKFNWYVDGVEVHNAKTKPCEEQYGSTYRCVSVLTVLHQDWLNGKEYKCKVSNKALPAPIEKTISKAKGQPREPQVYTLPPSREEMTKNQVSLTCLVKGFYPSDIAVEWESNGQPENNYKTTPPVLDSDGSFFLYSKLTVDKSRWQQGNVFSCSVMHEALHNHYTQKSLSLSPGK

SEQ ID NO: 1692 - protein, 984 aa, Artificial Sequence
  Synthetic peptide
EVQLLESGGGLVQPGGSLRLSCAASGFTFSVYAMSWVRQAPGKGLEWVSTISDSGGSTFYADSVKGRFTISRDNSKNTLYLQMNRLRAEDTAVYYCARHDYSNYAYFDYWGQGTLVTVSSGGGGSGGGGSGGGGSEIVLTQSPGTLSLSPGERATLSCRASQSVRSSYLAWYQQKPGQAPRLLIYGASSRATGIPDRFSGSGSGTDFTLTISRLEPEDFAVYYCQQYGDLPFTFGPGTKVEIKSGGGGSEVQLVESGGGLVQPGGSLKLSCAASGFTFNKYAMNWVRQAPGKGLEWVARIRSKYNNYATYYADSVKDRFTISRDDSKNTAYLQMNNLKTEDTAVYYCVRHGNFGNSYISYWAYWGQGTLVTVSSGGGGSGGGGSGGGGSQTVVTQEPSLTVSPGGTVTLTCGSSTGAVTSGNYPNWVQQKPGQAPRGLIGGTKFLAPGTPARFSGSLLGGKAALTLSGVQPEDEAEYYCVLWYSNRWVFGGGTKLTVLGGGGDKTHTCPPCPAPELLGGPSVFLFPPKPKDTLMISRTPEVTCVVVDVSHEDPEVKFNWYVDGVEVHNAKTKPCEEQYGSTYRCVSVLTVLHQDWLNGKEYKCKVSNKALPAPIEKTISKAKGQPREPQVYTLPPSREEMTKNQVSLTCLVKGFYPSDIAVEWESNGQPENNYKTTPPVLDSDGSFFLYSKLTVDKSRWQQGNVFSCSVMHEALHNHYTQKSLSLSPGGGGSGGGGSGGGGSGGGGSGGGGSGGGGSDKTHTCPPCPAPELLGGPSVFLFPPKPKDTLMISRTPEVTCVVVDVSHEDPEVKFNWYVDGVEVHNAKTKPCEEQYGSTYRCVSVLTVLHQDWLNGKEYKCKVSNKALPAPIEKTISKAKGQPREPQVYTLPPSREEMTKNQVSLTCLVKGFYPSDIAVEWESNGQPENNYKTTPPVLDSDGSFFLYSKLTVDKSRWQQGNVFSCSVMHEALHNHYTQKSLSLSPGK

SEQ ID NO: 1693 - protein, 984 aa, Artificial Sequence
  Synthetic peptide
EVQLLESGGGLVQPGGSLRLSCAASGFTFSVYAMSWVRQAPGKCLEWVSTISDSGGSTFYADSVKGRFTISRDNSKNTLYLQMNRLRAEDTAVYYCARHDYSNYAYFDYWGQGTLVTVSSGGGGSGGGGSGGGGSEIVLTQSPGTLSLSPGERATLSCRASQSVRSSYLAWYQQKPGQAPRLLIYGASSRATGIPDRFSGSGSGTDFTLTISRLEPEDFAVYYCQQYGDLPFTFGCGTKVEIKSGGGGSEVQLVESGGGLVQPGGSLKLSCAASGFTFNKYAMNWVRQAPGKGLEWVARIRSKYNNYATYYADSVKDRFTISRDDSKNTAYLQMNNLKTEDTAVYYCVRHGNFGNSYISYWAYWGQGTLVTVSSGGGGSGGGGSGGGGSQTVVTQEPSLTVSPGGTVTLTCGSSTGAVTSGNYPNWVQQKPGQAPRGLIGGTKFLAPGTPARFSGSLLGGKAALTLSGVQPEDEAEYYCVLWYSNRWVFGGGTKLTVLGGGGDKTHTCPPCPAPELLGGPSVFLFPPKPKDTLMISRTPEVTCVVVDVSHEDPEVKFNWYVDGVEVHNAKTKPCEEQYGSTYRCVSVLTVLHQDWLNGKEYKCKVSNKALPAPIEKTISKAKGQPREPQVYTLPPSREEMTKNQVSLTCLVKGFYPSDIAVEWESNGQPENNYKTTPPVLDSDGSFFLYSKLTVDKSRWQQGNVFSCSVMHEALHNHYTQKSLSLSPGGGGSGGGGSGGGGSGGGGSGGGGSGGGGSDKTHTCPPCPAPELLGGPSVFLFPPKPKDTLMISRTPEVTCVVVDVSHEDPEVKFNWYVDGVEVHNAKTKPCEEQYGSTYRCVSVLTVLHQDWLNGKEYKCKVSNKALPAPIEKTISKAKGQPREPQVYTLPPSREEMTKNQVSLTCLVKGFYPSDIAVEWESNGQPENNYKTTPPVLDSDGSFFLYSKLTVDKSRWQQGNVFSCSVMHEALHNHYTQKSLSLSPGK

SEQ ID NO: 1694 - protein, 987 aa, Artificial Sequence
  Synthetic peptide
QVQLVESGGGVVQPGRSLRLSCAASGFMFSSYGMHWVRQAPGKGLEWVAVISYDGSNKYYADSVKGRFTISRDNSKNTLYLQMNSLRAEDTAVYYCARGRYYGSGNYNHGMDVWGQGTTVTVSSGGGGSGGGGSGGGGSDIQMTQSPSSLSASVGDRVTITCRASQSISSYLNWYQQKPGKAPKLLIYAASSLQSGVPSRFSGRGSGTDFTLTISSLQPEDFATYYCQQSYSTPFTFGPGTKVEIKSGGGGSEVQLVESGGGLVQPGGSLKLSCAASGFTFNKYAMNWVRQAPGKGLEWVARIRSKYNNYATYYADSVKDRFTISRDDSKNTAYLQMNNLKTEDTAVYYCVRHGNFGNSYISYWAYWGQGTLVTVSSGGGGSGGGGSGGGGSQTVVTQEPSLTVSPGGTVTLTCGSSTGAVTSGNYPNWVQQKPGQAPRGLIGGTKFLAPGTPARFSGSLLGGKAALTLSGVQPEDEAEYYCVLWYSNRWVFGGGTKLTVLGGGGDKTHTCPPCPAPELLGGPSVFLFPPKPKDTLMISRTPEVTCVVVDVSHEDPEVKFNWYVDGVEVHNAKTKPCEEQYGSTYRCVSVLTVLHQDWLNGKEYKCKVSNKALPAPIEKTISKAKGQPREPQVYTLPPSREEMTKNQVSLTCLVKGFYPSDIAVEWESNGQPENNYKTTPPVLDSDGSFFLYSKLTVDKSRWQQGNVFSCSVMHEALHNHYTQKSLSLSPGGGGSGGGGSGGGGSGGGGSGGGGSGGGGSDKTHTCPPCPAPELLGGPSVFLFPPKPKDTLMISRTPEVTCVVVDVSHEDPEVKFNWYVDGVEVHNAKTKPCEEQYGSTYRCVSVLTVLHQDWLNGKEYKCKVSNKALPAPIEKTISKAKGQPREPQVYTLPPSREEMTKNQVSLTCLVKGFYPSDIAVEWESNGQPENNYKTTPPVLDSDGSFFLYSKLTVDKSRWQQGNVFSCSVMHEALHNHYTQKSLSLSPGK

SEQ ID NO: 1695 - protein, 987 aa, Artificial Sequence
  Synthetic peptide
QVQLVESGGGVVQPGRSLRLSCAASGFMFSSYGMHWVRQAPGKCLEWVAVISYDGSNKYYADSVKGRFTISRDNSKNTLYLQMNSLRAEDTAVYYCARGRYYGSGNYNHGMDVWGQGTTVTVSSGGGGSGGGGSGGGGSDIQMTQSPSSLSASVGDRVTITCRASQSISSYLNWYQQKPGKAPKLLIYAASSLQSGVPSRFSGRGSGTDFTLTISSLQPEDFATYYCQQSYSTPFTFGCGTKVEIKSGGGGSEVQLVESGGGLVQPGGSLKLSCAASGFTFNKYAMNWVRQAPGKGLEWVARIRSKYNNYATYYADSVKDRFTISRDDSKNTAYLQMNNLKTEDTAVYYCVRHGNFGNSYISYWAYWGQGTLVTVSSGGGGSGGGGSGGGGSQTVVTQEPSLTVSPGGTVTLTCGSSTGAVTSGNYPNWVQQKPGQAPRGLIGGTKFLAPGTPARFSGSLLGGKAALTLSGVQPEDEAEYYCVLWYSNRWVFGGGTKLTVLGGGGDKTHTCPPCPAPELLGGPSVFLFPPKPKDTLMISRTPEVTCVVVDVSHEDPEVKFNWYVDGVEVHNAKTKPCEEQYGSTYRCVSVLTVLHQDWLNGKEYKCKVSNKALPAPIEKTISKAKGQPREPQVYTLPPSREEMTKNQVSLTCLVKGFYPSDIAVEWESNGQPENNYKTTPPVLDSDGSFFLYSKLTVDKSRWQQGNVFSCSVMHEALHNHYTQKSLSLSPGGGGSGGGGSGGGGSGGGGSGGGGSGGGGSDKTHTCPPCPAPELLGGPSVFLFPPKPKDTLMISRTPEVTCVVVDVSHEDPEVKFNWYVDGVEVHNAKTKPCEEQYGSTYRCVSVLTVLHQDWLNGKEYKCKVSNKALPAPIEKTISKAKGQPREPQVYTLPPSREEMTKNQVSLTCLVKGFYPSDIAVEWESNGQPENNYKTTPPVLDSDGSFFLYSKLTVDKSRWQQGNVFSCSVMHEALHNHYTQKSLSLSPGK

SEQ ID NO: 1696 - protein, 986 aa, Artificial Sequence
  Synthetic peptide
EVQLLESGGGLVQPGGSLRLSCAASGFTFSSYAMSWVRQAPGKCLEWVSVISGSGGRPNYAESVKGRFTISRDNSKNTLYLQMNSLRDEDTAVYYCAKVDYSNYLFFDYWGQGTLVTVSSGGGGSGGGGSGGGGSEIVLTQSPGTLSLSPGEGATLSCRAGQSVRSSYLGWYQQKPGQAPRLLIYGASSRATGIPDRFSGSGSGTDFTLTISRLEPEDFAVYYCQQYGYSPPTFGCGTKLEIKSGGGGSEVQLVESGGGLVQPGGSLKLSCAASGFTFNKYAMNWVRQAPGKGLEWVARIRSKYNNYATYYADSVKDRFTISRDDSKNTAYLQMNNLKTEDTAVYYCVRHGNFGNSYISYWAYWGQGTLVTVSSGGGGSGGGGSGGGGSQTVVTQEPSLTVSPGGTVTLTCGSSTGAVTSGNYPNWVQQKPGQAPRGLIGGTKFLAPGTPARFSGSLLGGKAALTLSGVQPEDEAEYYCVLWYSNRWVFGGGTKLTVLGGGGDKTHTCPPCPAPELLGGPSVFLFPPKPKDTLMISRTPEVTCVVVDVSHEDPEVKFNWYVDGVEVHNAKTKPCEEQYGSTYRCVSVLTVLHQDWLNGKEYKCKVSNKALPAPIEKTISKAKGQPREPQVYTLPPSREEMTKNQVSLTCLVKGFYPSDIAVEWESNGQPENNYKTTPPVLDSDGSFFLYSKLTVDKSRWQQGNVFSCSVMHEALHNHYTQKSLSLSPGKGGGGSGGGGSGGGGSGGGGSGGGGSGGGGSDKTHTCPPCPAPELLGGPSVFLFPPKPKDTLMISRTPEVTCVVVDVSHEDPEVKFNWYVDGVEVHNAKTKPCEEQYGSTYRCVSVLTVLHQDWLNGKEYKCKVSNKALPAPIEKTISKAKGQPREPQVYTLPPSREEMTKNQVSLTCLVKGFYPSDIAVEWESNGQPENNYKTTPPVLDSDGSFFLYSKLTVDKSRWQQGNVFSCSVMHEALHNHYTQKSLSLSPGK

SEQ ID NO: 1697 - protein, 986 aa, Artificial Sequence
  Synthetic peptide
EVQLLESGGGLVQPGGSLRLSCAASGFTFSSYAMSWVRQAPGKGLEWVSVISGSGGRPNYAESVKGRFTISRDNSKNTLYLQMNSLRDEDTAVYYCAKVDYSNYLFFDYWGQGTLVTVSSGGGGSGGGGSGGGGSEIVLTQSPGTLSLSPGEGATLSCRAGQSVRSSYLGWYQQKPGQAPRLLIYGASSRATGIPDRFSGSGSGTDFTLTISRLEPEDFAVYYCQQYGYSPPTFGGGTKLEIKSGGGGSEVQLVESGGGLVQPGGSLKLSCAASGFTFNKYAMNWVRQAPGKGLEWVARIRSKYNNYATYYADSVKDRFTISRDDSKNTAYLQMNNLKTEDTAVYYCVRHGNFGNSYISYWAYWGQGTLVTVSSGGGGSGGGGSGGGGSQTVVTQEPSLTVSPGGTVTLTCGSSTGAVTSGNYPNWVQQKPGQAPRGLIGGTKFLAPGTPARFSGSLLGGKAALTLSGVQPEDEAEYYCVLWYSNRWVFGGGTKLTVLGGGGDKTHTCPPCPAPELLGGPSVFLFPPKPKDTLMISRTPEVTCVVVDVSHEDPEVKFNWYVDGVEVHNAKTKPCEEQYGSTYRCVSVLTVLHQDWLNGKEYKCKVSNKALPAPIEKTISKAKGQPREPQVYTLPPSREEMTKNQVSLTCLVKGFYPSDIAVEWESNGQPENNYKTTPPVLDSDGSFFLYSKLTVDKSRWQQGNVFSCSVMHEALHNHYTQKSLSLSPGKGGGGSGGGGSGGGGSGGGGSGGGGSGGGGSDKTHTCPPCPAPELLGGPSVFLFPPKPKDTLMISRTPEVTCVVVDVSHEDPEVKFNWYVDGVEVHNAKTKPCEEQYGSTYRCVSVLTVLHQDWLNGKEYKCKVSNKALPAPIEKTISKAKGQPREPQVYTLPPSREEMTKNQVSLTCLVKGFYPSDIAVEWESNGQPENNYKTTPPVLDSDGSFFLYSKLTVDKSRWQQGNVFSCSVMHEALHNHYTQKSLSLSPGK

SEQ ID NO: 1698 - protein, 986 aa, Artificial Sequence
  Synthetic peptide
EVQLLESGGGLVQPGGSLKLSCAASGFTFSIYAMSWVRQAPGKCLEWVSAISGSGGSTFYAESVKGRFTISRDNSKNTLYLQMNSLRAEDTAVYYCAKHDYSNYPYFDYWGQGTLVTVSSGGGGSGGGGSGGGGSEIVLTQSPGTLSLSPGERATLSCRASQSVRSSYLAWYQQKPGQAPRLLIYGASSRATGIPDRFSGSGSGTDFTLTISRLEPEDFAVYYCQQYGDLPFTFGCGTKLEIKSGGGGSEVQLVESGGGLVQPGGSLKLSCAASGFTFNKYAMNWVRQAPGKGLEWVARIRSKYNNYATYYADSVKDRFTISRDDSKNTAYLQMNNLKTEDTAVYYCVRHGNFGNSYISYWAYWGQGTLVTVSSGGGGSGGGGSGGGGSQTVVTQEPSLTVSPGGTVTLTCGSSTGAVTSGNYPNWVQQKPGQAPRGLIGGTKFLAPGTPARFSGSLLGGKAALTLSGVQPEDEAEYYCVLWYSNRWVFGGGTKLTVLGGGGDKTHTCPPCPAPELLGGPSVFLFPPKPKDTLMISRTPEVTCVVVDVSHEDPEVKFNWYVDGVEVHNAKTKPCEEQYGSTYRCVSVLTVLHQDWLNGKEYKCKVSNKALPAPIEKTISKAKGQPREPQVYTLPPSREEMTKNQVSLTCLVKGFYPSDIAVEWESNGQPENNYKTTPPVLDSDGSFFLYSKLTVDKSRWQQGNVFSCSVMHEALHNHYTQKSLSLSPGKGGGGSGGGGSGGGGSGGGGSGGGGSGGGGSDKTHTCPPCPAPELLGGPSVFLFPPKPKDTLMISRTPEVTCVVVDVSHEDPEVKFNWYVDGVEVHNAKTKPCEEQYGSTYRCVSVLTVLHQDWLNGKEYKCKVSNKALPAPIEKTISKAKGQPREPQVYTLPPSREEMTKNQVSLTCLVKGFYPSDIAVEWESNGQPENNYKTTPPVLDSDGSFFLYSKLTVDKSRWQQGNVFSCSVMHEALHNHYTQKSLSLSPGK

SEQ ID NO: 1699 - protein, 986 aa, Artificial Sequence
  Synthetic peptide
EVQLLESGGGLVQPGGSLKLSCAASGFTFSIYAMSWVRQAPGKGLEWVSAISGSGGSTFYAESVKGRFTISRDNSKNTLYLQMNSLRAEDTAVYYCAKHDYSNYPYFDYWGQGTLVTVSSGGGGSGGGGSGGGGSEIVLTQSPGTLSLSPGERATLSCRASQSVRSSYLAWYQQKPGQAPRLLIYGASSRATGIPDRFSGSGSGTDFTLTISRLEPEDFAVYYCQQYGDLPFTFGPGTKLEIKSGGGGSEVQLVESGGGLVQPGGSLKLSCAASGFTFNKYAMNWVRQAPGKGLEWVARIRSKYNNYATYYADSVKDRFTISRDDSKNTAYLQMNNLKTEDTAVYYCVRHGNFGNSYISYWAYWGQGTLVTVSSGGGGSGGGGSGGGGSQTVVTQEPSLTVSPGGTVTLTCGSSTGAVTSGNYPNWVQQKPGQAPRGLIGGTKFLAPGTPARFSGSLLGGKAALTLSGVQPEDEAEYYCVLWYSNRWVFGGGTKLTVLGGGGDKTHTCPPCPAPELLGGPSVFLFPPKPKDTLMISRTPEVTCVVVDVSHEDPEVKFNWYVDGVEVHNAKTKPCEEQYGSTYRCVSVLTVLHQDWLNGKEYKCKVSNKALPAPIEKTISKAKGQPREPQVYTLPPSREEMTKNQVSLTCLVKGFYPSDIAVEWESNGQPENNYKTTPPVLDSDGSFFLYSKLTVDKSRWQQGNVFSCSVMHEALHNHYTQKSLSLSPGKGGGGSGGGGSGGGGSGGGGSGGGGSGGGGSDKTHTCPPCPAPELLGGPSVFLFPPKPKDTLMISRTPEVTCVVVDVSHEDPEVKFNWYVDGVEVHNAKTKPCEEQYGSTYRCVSVLTVLHQDWLNGKEYKCKVSNKALPAPIEKTISKAKGQPREPQVYTLPPSREEMTKNQVSLTCLVKGFYPSDIAVEWESNGQPENNYKTTPPVLDSDGSFFLYSKLTVDKSRWQQGNVFSCSVMHEALHNHYTQKSLSLSPGK

SEQ ID NO: 1700 - protein, 986 aa, Artificial Sequence
  Synthetic peptide
EVQLLESGGGMVQPGGSLRLSCAASGFTFSSYAMSWVRQAPGKCLEWVSAISGSGGRTFYAESVEGRFTISRDNSKNTLFLQMNSLRAEDTAVYYCAKHDYSNYPYFDYWGQGTLVTVSSGGGGSGGGGSGGGGSEIVLTQSPGTLSLSPGERATLSCRASQSVRSSYLAWYQQKPGQAPRLLIYGASSRATGIPDRFSGSGSGTDFTLTISRLEPEDFAVYYCQQYGSSPFTFGCGTKLEIKSGGGGSEVQLVESGGGLVQPGGSLKLSCAASGFTFNKYAMNWVRQAPGKGLEWVARIRSKYNNYATYYADSVKDRFTISRDDSKNTAYLQMNNLKTEDTAVYYCVRHGNFGNSYISYWAYWGQGTLVTVSSGGGGSGGGGSGGGGSQTVVTQEPSLTVSPGGTVTLTCGSSTGAVTSGNYPNWVQQKPGQAPRGLIGGTKFLAPGTPARFSGSLLGGKAALTLSGVQPEDEAEYYCVLWYSNRWVFGGGTKLTVLGGGGDKTHTCPPCPAPELLGGPSVFLFPPKPKDTLMISRTPEVTCVVVDVSHEDPEVKFNWYVDGVEVHNAKTKPCEEQYGSTYRCVSVLTVLHQDWLNGKEYKCKVSNKALPAPIEKTISKAKGQPREPQVYTLPPSREEMTKNQVSLTCLVKGFYPSDIAVEWESNGQPENNYKTTPPVLDSDGSFFLYSKLTVDKSRWQQGNVFSCSVMHEALHNHYTQKSLSLSPGKGGGGSGGGGSGGGGSGGGGSGGGGSGGGGSDKTHTCPPCPAPELLGGPSVFLFPPKPKDTLMISRTPEVTCVVVDVSHEDPEVKFNWYVDGVEVHNAKTKPCEEQYGSTYRCVSVLTVLHQDWLNGKEYKCKVSNKALPAPIEKTISKAKGQPREPQVYTLPPSREEMTKNQVSLTCLVKGFYPSDIAVEWESNGQPENNYKTTPPVLDSDGSFFLYSKLTVDKSRWQQGNVFSCSVMHEALHNHYTQKSLSLSPGK

SEQ ID NO: 1701 - protein, 986 aa, Artificial Sequence
  Synthetic peptide
EVQLLESGGGMVQPGGSLRLSCAASGFTFSSYAMSWVRQAPGKGLEWVSAISGSGGRTFYAESVEGRFTISRDNSKNTLFLQMNSLRAEDTAVYYCAKHDYSNYPYFDYWGQGTLVTVSSGGGGSGGGGSGGGGSEIVLTQSPGTLSLSPGERATLSCRASQSVRSSYLAWYQQKPGQAPRLLIYGASSRATGIPDRFSGSGSGTDFTLTISRLEPEDFAVYYCQQYGSSPFTFGPGTKLEIKSGGGGSEVQLVESGGGLVQPGGSLKLSCAASGFTFNKYAMNWVRQAPGKGLEWVARIRSKYNNYATYYADSVKDRFTISRDDSKNTAYLQMNNLKTEDTAVYYCVRHGNFGNSYISYWAYWGQGTLVTVSSGGGGSGGGGSGGGGSQTVVTQEPSLTVSPGGTVTLTCGSSTGAVTSGNYPNWVQQKPGQAPRGLIGGTKFLAPGTPARFSGSLLGGKAALTLSGVQPEDEAEYYCVLWYSNRWVFGGGTKLTVLGGGGDKTHTCPPCPAPELLGGPSVFLFPPKPKDTLMISRTPEVTCVVVDVSHEDPEVKFNWYVDGVEVHNAKTKPCEEQYGSTYRCVSVLTVLHQDWLNGKEYKCKVSNKALPAPIEKTISKAKGQPREPQVYTLPPSREEMTKNQVSLTCLVKGFYPSDIAVEWESNGQPENNYKTTPPVLDSDGSFFLYSKLTVDKSRWQQGNVFSCSVMHEALHNHYTQKSLSLSPGKGGGGSGGGGSGGGGSGGGGSGGGGSGGGGSDKTHTCPPCPAPELLGGPSVFLFPPKPKDTLMISRTPEVTCVVVDVSHEDPEVKFNWYVDGVEVHNAKTKPCEEQYGSTYRCVSVLTVLHQDWLNGKEYKCKVSNKALPAPIEKTISKAKGQPREPQVYTLPPSREEMTKNQVSLTCLVKGFYPSDIAVEWESNGQPENNYKTTPPVLDSDGSFFLYSKLTVDKSRWQQGNVFSCSVMHEALHNHYTQKSLSLSPGK

SEQ ID NO: 1702 - protein, 986 aa, Artificial Sequence
  Synthetic peptide
EVQLLESGGGMVQPGGSLRLSCAASGFTFSSYAMSWVRQAPGKCLEWVSAISGSGGRTFYAESVEGRFTISRDNSKNTLYLQMNSLRAEDTAVYYCAKHDYSNYPYFDYWGQGTLVTVSSGGGGSGGGGSGGGGSEIVLTQSPGTLSLSPGERATLSCRASQSIRSSYLAWYQQKPGQAPRLLIYGASSRATGIPDRFSGSGSGTDFTLTISRLEPEDFAVYYCQQYGDLPFTFGCGTKLEIKSGGGGSEVQLVESGGGLVQPGGSLKLSCAASGFTFNKYAMNWVRQAPGKGLEWVARIRSKYNNYATYYADSVKDRFTISRDDSKNTAYLQMNNLKTEDTAVYYCVRHGNFGNSYISYWAYWGQGTLVTVSSGGGGSGGGGSGGGGSQTVVTQEPSLTVSPGGTVTLTCGSSTGAVTSGNYPNWVQQKPGQAPRGLIGGTKFLAPGTPARFSGSLLGGKAALTLSGVQPEDEAEYYCVLWYSNRWVFGGGTKLTVLGGGGDKTHTCPPCPAPELLGGPSVFLFPPKPKDTLMISRTPEVTCVVVDVSHEDPEVKFNWYVDGVEVHNAKTKPCEEQYGSTYRCVSVLTVLHQDWLNGKEYKCKVSNKALPAPIEKTISKAKGQPREPQVYTLPPSREEMTKNQVSLTCLVKGFYPSDIAVEWESNGQPENNYKTTPPVLDSDGSFFLYSKLTVDKSRWQQGNVFSCSVMHEALHNHYTQKSLSLSPGKGGGGSGGGGSGGGGSGGGGSGGGGSGGGGSDKTHTCPPCPAPELLGGPSVFLFPPKPKDTLMISRTPEVTCVVVDVSHEDPEVKFNWYVDGVEVHNAKTKPCEEQYGSTYRCVSVLTVLHQDWLNGKEYKCKVSNKALPAPIEKTISKAKGQPREPQVYTLPPSREEMTKNQVSLTCLVKGFYPSDIAVEWESNGQPENNYKTTPPVLDSDGSFFLYSKLTVDKSRWQQGNVFSCSVMHEALHNHYTQKSLSLSPGK

SEQ ID NO: 1703 - protein, 986 aa, Artificial Sequence
  Synthetic peptide
EVQLLESGGGMVQPGGSLRLSCAASGFTFSSYAMSWVRQAPGKGLEWVSAISGSGGRTFYAESVEGRFTISRDNSKNTLYLQMNSLRAEDTAVYYCAKHDYSNYPYFDYWGQGTLVTVSSGGGGSGGGGSGGGGSEIVLTQSPGTLSLSPGERATLSCRASQSIRSSYLAWYQQKPGQAPRLLIYGASSRATGIPDRFSGSGSGTDFTLTISRLEPEDFAVYYCQQYGDLPFTFGPGTKLEIKSGGGGSEVQLVESGGGLVQPGGSLKLSCAASGFTFNKYAMNWVRQAPGKGLEWVARIRSKYNNYATYYADSVKDRFTISRDDSKNTAYLQMNNLKTEDTAVYYCVRHGNFGNSYISYWAYWGQGTLVTVSSGGGGSGGGGSGGGGSQTVVTQEPSLTVSPGGTVTLTCGSSTGAVTSGNYPNWVQQKPGQAPRGLIGGTKFLAPGTPARFSGSLLGGKAALTLSGVQPEDEAEYYCVLWYSNRWVFGGGTKLTVLGGGGDKTHTCPPCPAPELLGGPSVFLFPPKPKDTLMISRTPEVTCVVVDVSHEDPEVKFNWYVDGVEVHNAKTKPCEEQYGSTYRCVSVLTVLHQDWLNGKEYKCKVSNKALPAPIEKTISKAKGQPREPQVYTLPPSREEMTKNQVSLTCLVKGFYPSDIAVEWESNGQPENNYKTTPPVLDSDGSFFLYSKLTVDKSRWQQGNVFSCSVMHEALHNHYTQKSLSLSPGKGGGGSGGGGSGGGGSGGGGSGGGGSGGGGSDKTHTCPPCPAPELLGGPSVFLFPPKPKDTLMISRTPEVTCVVVDVSHEDPEVKFNWYVDGVEVHNAKTKPCEEQYGSTYRCVSVLTVLHQDWLNGKEYKCKVSNKALPAPIEKTISKAKGQPREPQVYTLPPSREEMTKNQVSLTCLVKGFYPSDIAVEWESNGQPENNYKTTPPVLDSDGSFFLYSKLTVDKSRWQQGNVFSCSVMHEALHNHYTQKSLSLSPGK

SEQ ID NO: 1704 - protein, 986 aa, Artificial Sequence
  Synthetic peptide
EVQLLESGGGLVQSGGSLRLSCAASGFTFSSYAMSWVRQAPGKCLEWVSAISGSGGRTHYAESVKGRFTISRDNSKNTLYLQMNSLRAEDTAVYYCAKHDYSNYPYFDYWGQGTLVTVSSGGGGSGGGGSGGGGSEIVLTQSPGTLSLSPGERATLSCRASQSVRSSYLAWYQQKPGQAPRLLIYGASSRATGIPDRFSGSGSGTDFTLTISRLEPEDFAVYYCQQYGSSPFTFGCGTKLEIKSGGGGSEVQLVESGGGLVQPGGSLKLSCAASGFTFNKYAMNWVRQAPGKGLEWVARIRSKYNNYATYYADSVKDRFTISRDDSKNTAYLQMNNLKTEDTAVYYCVRHGNFGNSYISYWAYWGQGTLVTVSSGGGGSGGGGSGGGGSQTVVTQEPSLTVSPGGTVTLTCGSSTGAVTSGNYPNWVQQKPGQAPRGLIGGTKFLAPGTPARFSGSLLGGKAALTLSGVQPEDEAEYYCVLWYSNRWVFGGGTKLTVLGGGGDKTHTCPPCPAPELLGGPSVFLFPPKPKDTLMISRTPEVTCVVVDVSHEDPEVKFNWYVDGVEVHNAKTKPCEEQYGSTYRCVSVLTVLHQDWLNGKEYKCKVSNKALPAPIEKTISKAKGQPREPQVYTLPPSREEMTKNQVSLTCLVKGFYPSDIAVEWESNGQPENNYKTTPPVLDSDGSFFLYSKLTVDKSRWQQGNVFSCSVMHEALHNHYTQKSLSLSPGKGGGGSGGGGSGGGGSGGGGSGGGGSGGGGSDKTHTCPPCPAPELLGGPSVFLFPPKPKDTLMISRTPEVTCVVVDVSHEDPEVKFNWYVDGVEVHNAKTKPCEEQYGSTYRCVSVLTVLHQDWLNGKEYKCKVSNKALPAPIEKTISKAKGQPREPQVYTLPPSREEMTKNQVSLTCLVKGFYPSDIAVEWESNGQPENNYKTTPPVLDSDGSFFLYSKLTVDKSRWQQGNVFSCSVMHEALHNHYTQKSLSLSPGK

SEQ ID NO: 1705 - protein, 986 aa, Artificial Sequence
  Synthetic peptide
EVQLLESGGGLVQSGGSLRLSCAASGFTFSSYAMSWVRQAPGKGLEWVSAISGSGGRTHYAESVKGRFTISRDNSKNTLYLQMNSLRAEDTAVYYCAKHDYSNYPYFDYWGQGTLVTVSSGGGGSGGGGSGGGGSEIVLTQSPGTLSLSPGERATLSCRASQSVRSSYLAWYQQKPGQAPRLLIYGASSRATGIPDRFSGSGSGTDFTLTISRLEPEDFAVYYCQQYGSSPFTFGPGTKLEIKSGGGGSEVQLVESGGGLVQPGGSLKLSCAASGFTFNKYAMNWVRQAPGKGLEWVARIRSKYNNYATYYADSVKDRFTISRDDSKNTAYLQMNNLKTEDTAVYYCVRHGNFGNSYISYWAYWGQGTLVTVSSGGGGSGGGGSGGGGSQTVVTQEPSLTVSPGGTVTLTCGSSTGAVTSGNYPNWVQQKPGQAPRGLIGGTKFLAPGTPARFSGSLLGGKAALTLSGVQPEDEAEYYCVLWYSNRWVFGGGTKLTVLGGGGDKTHTCPPCPAPELLGGPSVFLFPPKPKDTLMISRTPEVTCVVVDVSHEDPEVKFNWYVDGVEVHNAKTKPCEEQYGSTYRCVSVLTVLHQDWLNGKEYKCKVSNKALPAPIEKTISKAKGQPREPQVYTLPPSREEMTKNQVSLTCLVKGFYPSDIAVEWESNGQPENNYKTTPPVLDSDGSFFLYSKLTVDKSRWQQGNVFSCSVMHEALHNHYTQKSLSLSPGKGGGGSGGGGSGGGGSGGGGSGGGGSGGGGSDKTHTCPPCPAPELLGGPSVFLFPPKPKDTLMISRTPEVTCVVVDVSHEDPEVKFNWYVDGVEVHNAKTKPCEEQYGSTYRCVSVLTVLHQDWLNGKEYKCKVSNKALPAPIEKTISKAKGQPREPQVYTLPPSREEMTKNQVSLTCLVKGFYPSDIAVEWESNGQPENNYKTTPPVLDSDGSFFLYSKLTVDKSRWQQGNVFSCSVMHEALHNHYTQKSLSLSPGK

SEQ ID NO: 1706 - protein, 986 aa, Artificial Sequence
  Synthetic peptide
EVQLLESGGGLVQPGGSLRLSCAASGFTFSSYAMSWVRQAPGKCLEWVSLISGSGGRTHYAESVKGRFTISRDNSKNTLYLQMNSLRAEDTAVYYCAKHDYSNYPYFDYWGQGTLVTVSSGGGGSGGGGSGGGGSEIVLTQSPGTLSLSPGERATLSCRASQSVRSTYLAWYQQKPGQAPRLLIYDASSRATGIPDRFSGSGSGTDFTLTISRLEPEDFAVYFCQQYGSSPPTFGCGTKLEIKSGGGGSEVQLVESGGGLVQPGGSLKLSCAASGFTFNKYAMNWVRQAPGKGLEWVARIRSKYNNYATYYADSVKDRFTISRDDSKNTAYLQMNNLKTEDTAVYYCVRHGNFGNSYISYWAYWGQGTLVTVSSGGGGSGGGGSGGGGSQTVVTQEPSLTVSPGGTVTLTCGSSTGAVTSGNYPNWVQQKPGQAPRGLIGGTKFLAPGTPARFSGSLLGGKAALTLSGVQPEDEAEYYCVLWYSNRWVFGGGTKLTVLGGGGDKTHTCPPCPAPELLGGPSVFLFPPKPKDTLMISRTPEVTCVVVDVSHEDPEVKFNWYVDGVEVHNAKTKPCEEQYGSTYRCVSVLTVLHQDWLNGKEYKCKVSNKALPAPIEKTISKAKGQPREPQVYTLPPSREEMTKNQVSLTCLVKGFYPSDIAVEWESNGQPENNYKTTPPVLDSDGSFFLYSKLTVDKSRWQQGNVFSCSVMHEALHNHYTQKSLSLSPGKGGGGSGGGGSGGGGSGGGGSGGGGSGGGGSDKTHTCPPCPAPELLGGPSVFLFPPKPKDTLMISRTPEVTCVVVDVSHEDPEVKFNWYVDGVEVHNAKTKPCEEQYGSTYRCVSVLTVLHQDWLNGKEYKCKVSNKALPAPIEKTISKAKGQPREPQVYTLPPSREEMTKNQVSLTCLVKGFYPSDIAVEWESNGQPENNYKTTPPVLDSDGSFFLYSKLTVDKSRWQQGNVFSCSVMHEALHNHYTQKSLSLSPGK

SEQ ID NO: 1707 - protein, 986 aa, Artificial Sequence
  Synthetic peptide
EVQLLESGGGLVQPGGSLRLSCAASGFTFSSYAMSWVRQAPGKGLEWVSLISGSGGRTHYAESVKGRFTISRDNSKNTLYLQMNSLRAEDTAVYYCAKHDYSNYPYFDYWGQGTLVTVSSGGGGSGGGGSGGGGSEIVLTQSPGTLSLSPGERATLSCRASQSVRSTYLAWYQQKPGQAPRLLIYDASSRATGIPDRFSGSGSGTDFTLTISRLEPEDFAVYFCQQYGSSPPTFGGGTKLEIKSGGGGSEVQLVESGGGLVQPGGSLKLSCAASGFTFNKYAMNWVRQAPGKGLEWVARIRSKYNNYATYYADSVKDRFTISRDDSKNTAYLQMNNLKTEDTAVYYCVRHGNFGNSYISYWAYWGQGTLVTVSSGGGGSGGGGSGGGGSQTVVTQEPSLTVSPGGTVTLTCGSSTGAVTSGNYPNWVQQKPGQAPRGLIGGTKFLAPGTPARFSGSLLGGKAALTLSGVQPEDEAEYYCVLWYSNRWVFGGGTKLTVLGGGGDKTHTCPPCPAPELLGGPSVFLFPPKPKDTLMISRTPEVTCVVVDVSHEDPEVKFNWYVDGVEVHNAKTKPCEEQYGSTYRCVSVLTVLHQDWLNGKEYKCKVSNKALPAPIEKTISKAKGQPREPQVYTLPPSREEMTKNQVSLTCLVKGFYPSDIAVEWESNGQPENNYKTTPPVLDSDGSFFLYSKLTVDKSRWQQGNVFSCSVMHEALHNHYTQKSLSLSPGKGGGGSGGGGSGGGGSGGGGSGGGGSGGGGSDKTHTCPPCPAPELLGGPSVFLFPPKPKDTLMISRTPEVTCVVVDVSHEDPEVKFNWYVDGVEVHNAKTKPCEEQYGSTYRCVSVLTVLHQDWLNGKEYKCKVSNKALPAPIEKTISKAKGQPREPQVYTLPPSREEMTKNQVSLTCLVKGFYPSDIAVEWESNGQPENNYKTTPPVLDSDGSFFLYSKLTVDKSRWQQGNVFSCSVMHEALHNHYTQKSLSLSPGK

SEQ ID NO: 1708 - protein, 986 aa, Artificial Sequence
  Synthetic peptide
EVQLLESGGGLVQPGGSLRLSCAASGFTFSTYAMSWVRQAPGKCLEWVSAISGSGGSTFYAESVKGRFTISRDNSKNTLSLQMNSLRAEDTAVYYCAKHDYSNYPYFDYWGQGTLVTVSSGGGGSGGGGSGGGGSEIVLTQSPGTLSLSPGERATLSCRASQSVRSSYLAWYQQKPGQAPRLLIYGASSRATGIPDRFSGSGSGTDFTLTISRLEPEDFAVYYCQQYGDLPFTFGCGTKLEIKSGGGGSEVQLVESGGGLVQPGGSLKLSCAASGFTFNKYAMNWVRQAPGKGLEWVARIRSKYNNYATYYADSVKDRFTISRDDSKNTAYLQMNNLKTEDTAVYYCVRHGNFGNSYISYWAYWGQGTLVTVSSGGGGSGGGGSGGGGSQTVVTQEPSLTVSPGGTVTLTCGSSTGAVTSGNYPNWVQQKPGQAPRGLIGGTKFLAPGTPARFSGSLLGGKAALTLSGVQPEDEAEYYCVLWYSNRWVFGGGTKLTVLGGGGDKTHTCPPCPAPELLGGPSVFLFPPKPKDTLMISRTPEVTCVVVDVSHEDPEVKFNWYVDGVEVHNAKTKPCEEQYGSTYRCVSVLTVLHQDWLNGKEYKCKVSNKALPAPIEKTISKAKGQPREPQVYTLPPSREEMTKNQVSLTCLVKGFYPSDIAVEWESNGQPENNYKTTPPVLDSDGSFFLYSKLTVDKSRWQQGNVFSCSVMHEALHNHYTQKSLSLSPGKGGGGSGGGGSGGGGSGGGGSGGGGSGGGGSDKTHTCPPCPAPELLGGPSVFLFPPKPKDTLMISRTPEVTCVVVDVSHEDPEVKFNWYVDGVEVHNAKTKPCEEQYGSTYRCVSVLTVLHQDWLNGKEYKCKVSNKALPAPIEKTISKAKGQPREPQVYTLPPSREEMTKNQVSLTCLVKGFYPSDIAVEWESNGQPENNYKTTPPVLDSDGSFFLYSKLTVDKSRWQQGNVFSCSVMHEALHNHYTQKSLSLSPGK

SEQ ID NO: 1709 - protein, 986 aa, Artificial Sequence
  Synthetic peptide
EVQLLESGGGLVQPGGSLRLSCAASGFTFSTYAMSWVRQAPGKGLEWVSAISGSGGSTFYAESVKGRFTISRDNSKNTLSLQMNSLRAEDTAVYYCAKHDYSNYPYFDYWGQGTLVTVSSGGGGSGGGGSGGGGSEIVLTQSPGTLSLSPGERATLSCRASQSVRSSYLAWYQQKPGQAPRLLIYGASSRATGIPDRFSGSGSGTDFTLTISRLEPEDFAVYYCQQYGDLPFTFGPGTKLEIKSGGGGSEVQLVESGGGLVQPGGSLKLSCAASGFTFNKYAMNWVRQAPGKGLEWVARIRSKYNNYATYYADSVKDRFTISRDDSKNTAYLQMNNLKTEDTAVYYCVRHGNFGNSYISYWAYWGQGTLVTVSSGGGGSGGGGSGGGGSQTVVTQEPSLTVSPGGTVTLTCGSSTGAVTSGNYPNWVQQKPGQAPRGLIGGTKFLAPGTPARFSGSLLGGKAALTLSGVQPEDEAEYYCVLWYSNRWVFGGGTKLTVLGGGGDKTHTCPPCPAPELLGGPSVFLFPPKPKDTLMISRTPEVTCVVVDVSHEDPEVKFNWYVDGVEVHNAKTKPCEEQYGSTYRCVSVLTVLHQDWLNGKEYKCKVSNKALPAPIEKTISKAKGQPREPQVYTLPPSREEMTKNQVSLTCLVKGFYPSDIAVEWESNGQPENNYKTTPPVLDSDGSFFLYSKLTVDKSRWQQGNVFSCSVMHEALHNHYTQKSLSLSPGKGGGGSGGGGSGGGGSGGGGSGGGGSGGGGSDKTHTCPPCPAPELLGGPSVFLFPPKPKDTLMISRTPEVTCVVVDVSHEDPEVKFNWYVDGVEVHNAKTKPCEEQYGSTYRCVSVLTVLHQDWLNGKEYKCKVSNKALPAPIEKTISKAKGQPREPQVYTLPPSREEMTKNQVSLTCLVKGFYPSDIAVEWESNGQPENNYKTTPPVLDSDGSFFLYSKLTVDKSRWQQGNVFSCSVMHEALHNHYTQKSLSLSPGK

SEQ ID NO: 1710 - protein, 986 aa, Artificial Sequence
  Synthetic peptide
EVQLLESGGGMVQPGGSLRLSCAASGFTFSTYAMSWVRQAPGKCLEWVSAISGSGGRTFYAESVEGRFTISRDNSKNTLYLQMNSLRAEDTAVYYCAKHDYSNYPYFDYWGQGTLVTVSSGGGGSGGGGSGGGGSEIVLTQSPGTLSLSPGERATLSCRASQSVRSTYLAWYQQKPGQAPRLLIYGASSRATGIPDRFSGSGSGTDFTLTISRLEPEDFAVYSCQQYGDLPFTFGCGTKLEIKSGGGGSEVQLVESGGGLVQPGGSLKLSCAASGFTFNKYAMNWVRQAPGKGLEWVARIRSKYNNYATYYADSVKDRFTISRDDSKNTAYLQMNNLKTEDTAVYYCVRHGNFGNSYISYWAYWGQGTLVTVSSGGGGSGGGGSGGGGSQTVVTQEPSLTVSPGGTVTLTCGSSTGAVTSGNYPNWVQQKPGQAPRGLIGGTKFLAPGTPARFSGSLLGGKAALTLSGVQPEDEAEYYCVLWYSNRWVFGGGTKLTVLGGGGDKTHTCPPCPAPELLGGPSVFLFPPKPKDTLMISRTPEVTCVVVDVSHEDPEVKFNWYVDGVEVHNAKTKPCEEQYGSTYRCVSVLTVLHQDWLNGKEYKCKVSNKALPAPIEKTISKAKGQPREPQVYTLPPSREEMTKNQVSLTCLVKGFYPSDIAVEWESNGQPENNYKTTPPVLDSDGSFFLYSKLTVDKSRWQQGNVFSCSVMHEALHNHYTQKSLSLSPGKGGGGSGGGGSGGGGSGGGGSGGGGSGGGGSDKTHTCPPCPAPELLGGPSVFLFPPKPKDTLMISRTPEVTCVVVDVSHEDPEVKFNWYVDGVEVHNAKTKPCEEQYGSTYRCVSVLTVLHQDWLNGKEYKCKVSNKALPAPIEKTISKAKGQPREPQVYTLPPSREEMTKNQVSLTCLVKGFYPSDIAVEWESNGQPENNYKTTPPVLDSDGSFFLYSKLTVDKSRWQQGNVFSCSVMHEALHNHYTQKSLSLSPGK

SEQ ID NO: 1711 - protein, 986 aa, Artificial Sequence
  Synthetic peptide
EVQLLESGGGMVQPGGSLRLSCAASGFTFSTYAMSWVRQAPGKGLEWVSAISGSGGRTFYAESVEGRFTISRDNSKNTLYLQMNSLRAEDTAVYYCAKHDYSNYPYFDYWGQGTLVTVSSGGGGSGGGGSGGGGSEIVLTQSPGTLSLSPGERATLSCRASQSVRSTYLAWYQQKPGQAPRLLIYGASSRATGIPDRFSGSGSGTDFTLTISRLEPEDFAVYSCQQYGDLPFTFGPGTKLEIKSGGGGSEVQLVESGGGLVQPGGSLKLSCAASGFTFNKYAMNWVRQAPGKGLEWVARIRSKYNNYATYYADSVKDRFTISRDDSKNTAYLQMNNLKTEDTAVYYCVRHGNFGNSYISYWAYWGQGTLVTVSSGGGGSGGGGSGGGGSQTVVTQEPSLTVSPGGTVTLTCGSSTGAVTSGNYPNWVQQKPGQAPRGLIGGTKFLAPGTPARFSGSLLGGKAALTLSGVQPEDEAEYYCVLWYSNRWVFGGGTKLTVLGGGGDKTHTCPPCPAPELLGGPSVFLFPPKPKDTLMISRTPEVTCVVVDVSHEDPEVKFNWYVDGVEVHNAKTKPCEEQYGSTYRCVSVLTVLHQDWLNGKEYKCKVSNKALPAPIEKTISKAKGQPREPQVYTLPPSREEMTKNQVSLTCLVKGFYPSDIAVEWESNGQPENNYKTTPPVLDSDGSFFLYSKLTVDKSRWQQGNVFSCSVMHEALHNHYTQKSLSLSPGKGGGGSGGGGSGGGGSGGGGSGGGGSGGGGSDKTHTCPPCPAPELLGGPSVFLFPPKPKDTLMISRTPEVTCVVVDVSHEDPEVKFNWYVDGVEVHNAKTKPCEEQYGSTYRCVSVLTVLHQDWLNGKEYKCKVSNKALPAPIEKTISKAKGQPREPQVYTLPPSREEMTKNQVSLTCLVKGFYPSDIAVEWESNGQPENNYKTTPPVLDSDGSFFLYSKLTVDKSRWQQGNVFSCSVMHEALHNHYTQKSLSLSPGK

SEQ ID NO: 1712 - protein, 986 aa, Artificial Sequence
  Synthetic peptide
EVQLLESGGGLVQPGGSLRLSCAASGFTFSSYAMSWVRQAPGKCLEWVSAISGSGGYTYYAESVKGRFTISRDNSKNTLYLQMNSLRAEDTAVYYCAKHDYSNYPYFDYWGQGTLVTVSSGGGGSGGGGSGGGGSEIVLTQSPGTLSLSPGERATLSCRASQSVRSNYLAWYQQKPGQAPRLLIYGASSRATGIPDRFSGSGSGTDFTLTISRLEPEDFAVYYCQQYGDLPFTFGCGTKVEIKSGGGGSEVQLVESGGGLVQPGGSLKLSCAASGFTFNKYAMNWVRQAPGKGLEWVARIRSKYNNYATYYADSVKDRFTISRDDSKNTAYLQMNNLKTEDTAVYYCVRHGNFGNSYISYWAYWGQGTLVTVSSGGGGSGGGGSGGGGSQTVVTQEPSLTVSPGGTVTLTCGSSTGAVTSGNYPNWVQQKPGQAPRGLIGGTKFLAPGTPARFSGSLLGGKAALTLSGVQPEDEAEYYCVLWYSNRWVFGGGTKLTVLGGGGDKTHTCPPCPAPELLGGPSVFLFPPKPKDTLMISRTPEVTCVVVDVSHEDPEVKFNWYVDGVEVHNAKTKPCEEQYGSTYRCVSVLTVLHQDWLNGKEYKCKVSNKALPAPIEKTISKAKGQPREPQVYTLPPSREEMTKNQVSLTCLVKGFYPSDIAVEWESNGQPENNYKTTPPVLDSDGSFFLYSKLTVDKSRWQQGNVFSCSVMHEALHNHYTQKSLSLSPGKGGGGSGGGGSGGGGSGGGGSGGGGSGGGGSDKTHTCPPCPAPELLGGPSVFLFPPKPKDTLMISRTPEVTCVVVDVSHEDPEVKFNWYVDGVEVHNAKTKPCEEQYGSTYRCVSVLTVLHQDWLNGKEYKCKVSNKALPAPIEKTISKAKGQPREPQVYTLPPSREEMTKNQVSLTCLVKGFYPSDIAVEWESNGQPENNYKTTPPVLDSDGSFFLYSKLTVDKSRWQQGNVFSCSVMHEALHNHYTQKSLSLSPGK

SEQ ID NO: 1713 - protein, 986 aa, Artificial Sequence
  Synthetic peptide
EVQLLESGGGLVQPGGSLRLSCAASGFTFSSYAMSWVRQAPGKGLEWVSAISGSGGYTYYAESVKGRFTISRDNSKNTLYLQMNSLRAEDTAVYYCAKHDYSNYPYFDYWGQGTLVTVSSGGGGSGGGGSGGGGSEIVLTQSPGTLSLSPGERATLSCRASQSVRSNYLAWYQQKPGQAPRLLIYGASSRATGIPDRFSGSGSGTDFTLTISRLEPEDFAVYYCQQYGDLPFTFGPGTKVEIKSGGGGSEVQLVESGGGLVQPGGSLKLSCAASGFTFNKYAMNWVRQAPGKGLEWVARIRSKYNNYATYYADSVKDRFTISRDDSKNTAYLQMNNLKTEDTAVYYCVRHGNFGNSYISYWAYWGQGTLVTVSSGGGGSGGGGSGGGGSQTVVTQEPSLTVSPGGTVTLTCGSSTGAVTSGNYPNWVQQKPGQAPRGLIGGTKFLAPGTPARFSGSLLGGKAALTLSGVQPEDEAEYYCVLWYSNRWVFGGGTKLTVLGGGGDKTHTCPPCPAPELLGGPSVFLFPPKPKDTLMISRTPEVTCVVVDVSHEDPEVKFNWYVDGVEVHNAKTKPCEEQYGSTYRCVSVLTVLHQDWLNGKEYKCKVSNKALPAPIEKTISKAKGQPREPQVYTLPPSREEMTKNQVSLTCLVKGFYPSDIAVEWESNGQPENNYKTTPPVLDSDGSFFLYSKLTVDKSRWQQGNVFSCSVMHEALHNHYTQKSLSLSPGKGGGGSGGGGSGGGGSGGGGSGGGGSGGGGSDKTHTCPPCPAPELLGGPSVFLFPPKPKDTLMISRTPEVTCVVVDVSHEDPEVKFNWYVDGVEVHNAKTKPCEEQYGSTYRCVSVLTVLHQDWLNGKEYKCKVSNKALPAPIEKTISKAKGQPREPQVYTLPPSREEMTKNQVSLTCLVKGFYPSDIAVEWESNGQPENNYKTTPPVLDSDGSFFLYSKLTVDKSRWQQGNVFSCSVMHEALHNHYTQKSLSLSPGK

SEQ ID NO: 1714 - protein, 986 aa, Artificial Sequence
  Synthetic peptide
EVQLLESGGGLAQPGGSLRLSCAASGFTFSSYAMSWVRQAPGKCLEWVSAISGSGGSTFYAESVKGRFTISRDNSKNTLYLQMNSLRAEDTAVYFCAKHDYSNYPYFDYWGQGTLVTVSSGGGGSGGGGSGGGGSEIVLTQSPGTLSLSPGERATLSCRASQSVRSSYLAWYQQKPGQAPRLLIYGASSRATGIPDRFSGSGSGTDFTLTISRLEPEDFAVYYCQQYGDLPFTFGCGTKVEIKSGGGGSEVQLVESGGGLVQPGGSLKLSCAASGFTFNKYAMNWVRQAPGKGLEWVARIRSKYNNYATYYADSVKDRFTISRDDSKNTAYLQMNNLKTEDTAVYYCVRHGNFGNSYISYWAYWGQGTLVTVSSGGGGSGGGGSGGGGSQTVVTQEPSLTVSPGGTVTLTCGSSTGAVTSGNYPNWVQQKPGQAPRGLIGGTKFLAPGTPARFSGSLLGGKAALTLSGVQPEDEAEYYCVLWYSNRWVFGGGTKLTVLGGGGDKTHTCPPCPAPELLGGPSVFLFPPKPKDTLMISRTPEVTCVVVDVSHEDPEVKFNWYVDGVEVHNAKTKPCEEQYGSTYRCVSVLTVLHQDWLNGKEYKCKVSNKALPAPIEKTISKAKGQPREPQVYTLPPSREEMTKNQVSLTCLVKGFYPSDIAVEWESNGQPENNYKTTPPVLDSDGSFFLYSKLTVDKSRWQQGNVFSCSVMHEALHNHYTQKSLSLSPGKGGGGSGGGGSGGGGSGGGGSGGGGSGGGGSDKTHTCPPCPAPELLGGPSVFLFPPKPKDTLMISRTPEVTCVVVDVSHEDPEVKFNWYVDGVEVHNAKTKPCEEQYGSTYRCVSVLTVLHQDWLNGKEYKCKVSNKALPAPIEKTISKAKGQPREPQVYTLPPSREEMTKNQVSLTCLVKGFYPSDIAVEWESNGQPENNYKTTPPVLDSDGSFFLYSKLTVDKSRWQQGNVFSCSVMHEALHNHYTQKSLSLSPGK

SEQ ID NO: 1715 - protein, 986 aa, Artificial Sequence
  Synthetic peptide
EVQLLESGGGLAQPGGSLRLSCAASGFTFSSYAMSWVRQAPGKGLEWVSAISGSGGSTFYAESVKGRFTISRDNSKNTLYLQMNSLRAEDTAVYFCAKHDYSNYPYFDYWGQGTLVTVSSGGGGSGGGGSGGGGSEIVLTQSPGTLSLSPGERATLSCRASQSVRSSYLAWYQQKPGQAPRLLIYGASSRATGIPDRFSGSGSGTDFTLTISRLEPEDFAVYYCQQYGDLPFTFGPGTKVEIKSGGGGSEVQLVESGGGLVQPGGSLKLSCAASGFTFNKYAMNWVRQAPGKGLEWVARIRSKYNNYATYYADSVKDRFTISRDDSKNTAYLQMNNLKTEDTAVYYCVRHGNFGNSYISYWAYWGQGTLVTVSSGGGGSGGGGSGGGGSQTVVTQEPSLTVSPGGTVTLTCGSSTGAVTSGNYPNWVQQKPGQAPRGLIGGTKFLAPGTPARFSGSLLGGKAALTLSGVQPEDEAEYYCVLWYSNRWVFGGGTKLTVLGGGGDKTHTCPPCPAPELLGGPSVFLFPPKPKDTLMISRTPEVTCVVVDVSHEDPEVKFNWYVDGVEVHNAKTKPCEEQYGSTYRCVSVLTVLHQDWLNGKEYKCKVSNKALPAPIEKTISKAKGQPREPQVYTLPPSREEMTKNQVSLTCLVKGFYPSDIAVEWESNGQPENNYKTTPPVLDSDGSFFLYSKLTVDKSRWQQGNVFSCSVMHEALHNHYTQKSLSLSPGKGGGGSGGGGSGGGGSGGGGSGGGGSGGGGSDKTHTCPPCPAPELLGGPSVFLFPPKPKDTLMISRTPEVTCVVVDVSHEDPEVKFNWYVDGVEVHNAKTKPCEEQYGSTYRCVSVLTVLHQDWLNGKEYKCKVSNKALPAPIEKTISKAKGQPREPQVYTLPPSREEMTKNQVSLTCLVKGFYPSDIAVEWESNGQPENNYKTTPPVLDSDGSFFLYSKLTVDKSRWQQGNVFSCSVMHEALHNHYTQKSLSLSPGK

SEQ ID NO: 1716 - protein, 986 aa, Artificial Sequence
  Synthetic peptide
EVQLLESGGGMVQPGGSLRLSCAASGFTFSSYAMSWVRQAPGKCLEWVSAISGSGGRTFYAESVEGRFTISRDNSKNTLYLQMNSLRAEDTAVYYCAKHDYSNYPYFDYWGQGTLVTVSSGGGGSGGGGSGGGGSEIVLTQSPGTLSLSPGERATLSCRASQSVRSNYLAWYQQKPGQAPRLLIYGASSRATGIPDRFSGSGSGTDFTLTISRLEPEDFAVYYCQQYGDLPFTFGCGTKVEIKSGGGGSEVQLVESGGGLVQPGGSLKLSCAASGFTFNKYAMNWVRQAPGKGLEWVARIRSKYNNYATYYADSVKDRFTISRDDSKNTAYLQMNNLKTEDTAVYYCVRHGNFGNSYISYWAYWGQGTLVTVSSGGGGSGGGGSGGGGSQTVVTQEPSLTVSPGGTVTLTCGSSTGAVTSGNYPNWVQQKPGQAPRGLIGGTKFLAPGTPARFSGSLLGGKAALTLSGVQPEDEAEYYCVLWYSNRWVFGGGTKLTVLGGGGDKTHTCPPCPAPELLGGPSVFLFPPKPKDTLMISRTPEVTCVVVDVSHEDPEVKFNWYVDGVEVHNAKTKPCEEQYGSTYRCVSVLTVLHQDWLNGKEYKCKVSNKALPAPIEKTISKAKGQPREPQVYTLPPSREEMTKNQVSLTCLVKGFYPSDIAVEWESNGQPENNYKTTPPVLDSDGSFFLYSKLTVDKSRWQQGNVFSCSVMHEALHNHYTQKSLSLSPGKGGGGSGGGGSGGGGSGGGGSGGGGSGGGGSDKTHTCPPCPAPELLGGPSVFLFPPKPKDTLMISRTPEVTCVVVDVSHEDPEVKFNWYVDGVEVHNAKTKPCEEQYGSTYRCVSVLTVLHQDWLNGKEYKCKVSNKALPAPIEKTISKAKGQPREPQVYTLPPSREEMTKNQVSLTCLVKGFYPSDIAVEWESNGQPENNYKTTPPVLDSDGSFFLYSKLTVDKSRWQQGNVFSCSVMHEALHNHYTQKSLSLSPGK

SEQ ID NO: 1717 - protein, 986 aa, Artificial Sequence
  Synthetic peptide
EVQLLESGGGMVQPGGSLRLSCAASGFTFSSYAMSWVRQAPGKGLEWVSAISGSGGRTFYAESVEGRFTISRDNSKNTLYLQMNSLRAEDTAVYYCAKHDYSNYPYFDYWGQGTLVTVSSGGGGSGGGGSGGGGSEIVLTQSPGTLSLSPGERATLSCRASQSVRSNYLAWYQQKPGQAPRLLIYGASSRATGIPDRFSGSGSGTDFTLTISRLEPEDFAVYYCQQYGDLPFTFGPGTKVEIKSGGGGSEVQLVESGGGLVQPGGSLKLSCAASGFTFNKYAMNWVRQAPGKGLEWVARIRSKYNNYATYYADSVKDRFTISRDDSKNTAYLQMNNLKTEDTAVYYCVRHGNFGNSYISYWAYWGQGTLVTVSSGGGGSGGGGSGGGGSQTVVTQEPSLTVSPGGTVTLTCGSSTGAVTSGNYPNWVQQKPGQAPRGLIGGTKFLAPGTPARFSGSLLGGKAALTLSGVQPEDEAEYYCVLWYSNRWVFGGGTKLTVLGGGGDKTHTCPPCPAPELLGGPSVFLFPPKPKDTLMISRTPEVTCVVVDVSHEDPEVKFNWYVDGVEVHNAKTKPCEEQYGSTYRCVSVLTVLHQDWLNGKEYKCKVSNKALPAPIEKTISKAKGQPREPQVYTLPPSREEMTKNQVSLTCLVKGFYPSDIAVEWESNGQPENNYKTTPPVLDSDGSFFLYSKLTVDKSRWQQGNVFSCSVMHEALHNHYTQKSLSLSPGKGGGGSGGGGSGGGGSGGGGSGGGGSGGGGSDKTHTCPPCPAPELLGGPSVFLFPPKPKDTLMISRTPEVTCVVVDVSHEDPEVKFNWYVDGVEVHNAKTKPCEEQYGSTYRCVSVLTVLHQDWLNGKEYKCKVSNKALPAPIEKTISKAKGQPREPQVYTLPPSREEMTKNQVSLTCLVKGFYPSDIAVEWESNGQPENNYKTTPPVLDSDGSFFLYSKLTVDKSRWQQGNVFSCSVMHEALHNHYTQKSLSLSPGK

SEQ ID NO: 1718 - protein, 986 aa, Artificial Sequence
  Synthetic peptide
EVQLLESGGGMVQPGGSLRLSCAASGFTFSSYAMSWVRQAPGKCLEWVSAISGSGGRTFYAESVEGRFTISRDNSKNTLYLQMNSLRAEDTAVYYCAKHDYSNYPYFDYWGQGTLVTVSSGGGGSGGGGSGGGGSEIVLTQSPGTLSLSPGERATLSCRASQSVRSSYLAWYQQKPGQAPRLLIYGASSRATGIPDRFSGSGSGTDFTLTISRLEPEDFAVYYCQQYGSSPFTFGCGTKVEIKSGGGGSEVQLVESGGGLVQPGGSLKLSCAASGFTFNKYAMNWVRQAPGKGLEWVARIRSKYNNYATYYADSVKDRFTISRDDSKNTAYLQMNNLKTEDTAVYYCVRHGNFGNSYISYWAYWGQGTLVTVSSGGGGSGGGGSGGGGSQTVVTQEPSLTVSPGGTVTLTCGSSTGAVTSGNYPNWVQQKPGQAPRGLIGGTKFLAPGTPARFSGSLLGGKAALTLSGVQPEDEAEYYCVLWYSNRWVFGGGTKLTVLGGGGDKTHTCPPCPAPELLGGPSVFLFPPKPKDTLMISRTPEVTCVVVDVSHEDPEVKFNWYVDGVEVHNAKTKPCEEQYGSTYRCVSVLTVLHQDWLNGKEYKCKVSNKALPAPIEKTISKAKGQPREPQVYTLPPSREEMTKNQVSLTCLVKGFYPSDIAVEWESNGQPENNYKTTPPVLDSDGSFFLYSKLTVDKSRWQQGNVFSCSVMHEALHNHYTQKSLSLSPGKGGGGSGGGGSGGGGSGGGGSGGGGSGGGGSDKTHTCPPCPAPELLGGPSVFLFPPKPKDTLMISRTPEVTCVVVDVSHEDPEVKFNWYVDGVEVHNAKTKPCEEQYGSTYRCVSVLTVLHQDWLNGKEYKCKVSNKALPAPIEKTISKAKGQPREPQVYTLPPSREEMTKNQVSLTCLVKGFYPSDIAVEWESNGQPENNYKTTPPVLDSDGSFFLYSKLTVDKSRWQQGNVFSCSVMHEALHNHYTQKSLSLSPGK

SEQ ID NO: 1719 - protein, 986 aa, Artificial Sequence
  Synthetic peptide
EVQLLESGGGMVQPGGSLRLSCAASGFTFSSYAMSWVRQAPGKGLEWVSAISGSGGRTFYAESVEGRFTISRDNSKNTLYLQMNSLRAEDTAVYYCAKHDYSNYPYFDYWGQGTLVTVSSGGGGSGGGGSGGGGSEIVLTQSPGTLSLSPGERATLSCRASQSVRSSYLAWYQQKPGQAPRLLIYGASSRATGIPDRFSGSGSGTDFTLTISRLEPEDFAVYYCQQYGSSPFTFGPGTKVEIKSGGGGSEVQLVESGGGLVQPGGSLKLSCAASGFTFNKYAMNWVRQAPGKGLEWVARIRSKYNNYATYYADSVKDRFTISRDDSKNTAYLQMNNLKTEDTAVYYCVRHGNFGNSYISYWAYWGQGTLVTVSSGGGGSGGGGSGGGGSQTVVTQEPSLTVSPGGTVTLTCGSSTGAVTSGNYPNWVQQKPGQAPRGLIGGTKFLAPGTPARFSGSLLGGKAALTLSGVQPEDEAEYYCVLWYSNRWVFGGGTKLTVLGGGGDKTHTCPPCPAPELLGGPSVFLFPPKPKDTLMISRTPEVTCVVVDVSHEDPEVKFNWYVDGVEVHNAKTKPCEEQYGSTYRCVSVLTVLHQDWLNGKEYKCKVSNKALPAPIEKTISKAKGQPREPQVYTLPPSREEMTKNQVSLTCLVKGFYPSDIAVEWESNGQPENNYKTTPPVLDSDGSFFLYSKLTVDKSRWQQGNVFSCSVMHEALHNHYTQKSLSLSPGKGGGGSGGGGSGGGGSGGGGSGGGGSGGGGSDKTHTCPPCPAPELLGGPSVFLFPPKPKDTLMISRTPEVTCVVVDVSHEDPEVKFNWYVDGVEVHNAKTKPCEEQYGSTYRCVSVLTVLHQDWLNGKEYKCKVSNKALPAPIEKTISKAKGQPREPQVYTLPPSREEMTKNQVSLTCLVKGFYPSDIAVEWESNGQPENNYKTTPPVLDSDGSFFLYSKLTVDKSRWQQGNVFSCSVMHEALHNHYTQKSLSLSPGK

SEQ ID NO: 1720 - protein, 986 aa, Artificial Sequence
  Synthetic peptide
EVQLLESGGGLVQPGGSLRLSCAASGFTFSSYAMSWVRQAPGKCLEWVSAISGSGGSTFYAESVQGRFTISRDNSKNTLYLQVNSLRAEDTAVYYCARHDYSNYPYFDYWGQGTLVTVSSGGGGSGGGGSGGGGSEIVLTQSPGTLSLSPGERATLSCRASQSVRGNYLAWYQQKPGQAPRLLIYGASSRATGIPDRFSGSGSGTDFTLTISRLEPEDFAVYYCQQYGYSPFTFGCGTKVEIKSGGGGSEVQLVESGGGLVQPGGSLKLSCAASGFTFNKYAMNWVRQAPGKGLEWVARIRSKYNNYATYYADSVKDRFTISRDDSKNTAYLQMNNLKTEDTAVYYCVRHGNFGNSYISYWAYWGQGTLVTVSSGGGGSGGGGSGGGGSQTVVTQEPSLTVSPGGTVTLTCGSSTGAVTSGNYPNWVQQKPGQAPRGLIGGTKFLAPGTPARFSGSLLGGKAALTLSGVQPEDEAEYYCVLWYSNRWVFGGGTKLTVLGGGGDKTHTCPPCPAPELLGGPSVFLFPPKPKDTLMISRTPEVTCVVVDVSHEDPEVKFNWYVDGVEVHNAKTKPCEEQYGSTYRCVSVLTVLHQDWLNGKEYKCKVSNKALPAPIEKTISKAKGQPREPQVYTLPPSREEMTKNQVSLTCLVKGFYPSDIAVEWESNGQPENNYKTTPPVLDSDGSFFLYSKLTVDKSRWQQGNVFSCSVMHEALHNHYTQKSLSLSPGKGGGGSGGGGSGGGGSGGGGSGGGGSGGGGSDKTHTCPPCPAPELLGGPSVFLFPPKPKDTLMISRTPEVTCVVVDVSHEDPEVKFNWYVDGVEVHNAKTKPCEEQYGSTYRCVSVLTVLHQDWLNGKEYKCKVSNKALPAPIEKTISKAKGQPREPQVYTLPPSREEMTKNQVSLTCLVKGFYPSDIAVEWESNGQPENNYKTTPPVLDSDGSFFLYSKLTVDKSRWQQGNVFSCSVMHEALHNHYTQKSLSLSPGK

SEQ ID NO: 1721 - protein, 986 aa, Artificial Sequence
  Synthetic peptide
EVQLLESGGGLVQPGGSLRLSCAASGFTFSSYAMSWVRQAPGKGLEWVSAISGSGGSTFYAESVQGRFTISRDNSKNTLYLQVNSLRAEDTAVYYCARHDYSNYPYFDYWGQGTLVTVSSGGGGSGGGGSGGGGSEIVLTQSPGTLSLSPGERATLSCRASQSVRGNYLAWYQQKPGQAPRLLIYGASSRATGIPDRFSGSGSGTDFTLTISRLEPEDFAVYYCQQYGYSPFTFGPGTKVEIKSGGGGSEVQLVESGGGLVQPGGSLKLSCAASGFTFNKYAMNWVRQAPGKGLEWVARIRSKYNNYATYYADSVKDRFTISRDDSKNTAYLQMNNLKTEDTAVYYCVRHGNFGNSYISYWAYWGQGTLVTVSSGGGGSGGGGSGGGGSQTVVTQEPSLTVSPGGTVTLTCGSSTGAVTSGNYPNWVQQKPGQAPRGLIGGTKFLAPGTPARFSGSLLGGKAALTLSGVQPEDEAEYYCVLWYSNRWVFGGGTKLTVLGGGGDKTHTCPPCPAPELLGGPSVFLFPPKPKDTLMISRTPEVTCVVVDVSHEDPEVKFNWYVDGVEVHNAKTKPCEEQYGSTYRCVSVLTVLHQDWLNGKEYKCKVSNKALPAPIEKTISKAKGQPREPQVYTLPPSREEMTKNQVSLTCLVKGFYPSDIAVEWESNGQPENNYKTTPPVLDSDGSFFLYSKLTVDKSRWQQGNVFSCSVMHEALHNHYTQKSLSLSPGKGGGGSGGGGSGGGGSGGGGSGGGGSGGGGSDKTHTCPPCPAPELLGGPSVFLFPPKPKDTLMISRTPEVTCVVVDVSHEDPEVKFNWYVDGVEVHNAKTKPCEEQYGSTYRCVSVLTVLHQDWLNGKEYKCKVSNKALPAPIEKTISKAKGQPREPQVYTLPPSREEMTKNQVSLTCLVKGFYPSDIAVEWESNGQPENNYKTTPPVLDSDGSFFLYSKLTVDKSRWQQGNVFSCSVMHEALHNHYTQKSLSLSPGK

SEQ ID NO: 1722 - protein, 986 aa, Artificial Sequence
  Synthetic peptide
EVQLLESGGGLVQPGGSLRLSCAASGFTFSTYAMSWVRQAPGKCLEWVSAISGSGGGTFYAESVKGRFTISRDNSKNTLYLQMNSLRAEDTAVYYCAKHDYSNYPYFDYWGQGTLVTVSSGGGGSGGGGSGGGGSEIVLTQSPGTLSLSPGERATLSCRASQSIRSNYLAWYQQKPGQAPRLLIYGASSRATGIPDRFSGSGSGTDFTLTISRLEPEDFAVYYCQQYGSSPFTFGCGTKVEIKSGGGGSEVQLVESGGGLVQPGGSLKLSCAASGFTFNKYAMNWVRQAPGKGLEWVARIRSKYNNYATYYADSVKDRFTISRDDSKNTAYLQMNNLKTEDTAVYYCVRHGNFGNSYISYWAYWGQGTLVTVSSGGGGSGGGGSGGGGSQTVVTQEPSLTVSPGGTVTLTCGSSTGAVTSGNYPNWVQQKPGQAPRGLIGGTKFLAPGTPARFSGSLLGGKAALTLSGVQPEDEAEYYCVLWYSNRWVFGGGTKLTVLGGGGDKTHTCPPCPAPELLGGPSVFLFPPKPKDTLMISRTPEVTCVVVDVSHEDPEVKFNWYVDGVEVHNAKTKPCEEQYGSTYRCVSVLTVLHQDWLNGKEYKCKVSNKALPAPIEKTISKAKGQPREPQVYTLPPSREEMTKNQVSLTCLVKGFYPSDIAVEWESNGQPENNYKTTPPVLDSDGSFFLYSKLTVDKSRWQQGNVFSCSVMHEALHNHYTQKSLSLSPGKGGGGSGGGGSGGGGSGGGGSGGGGSGGGGSDKTHTCPPCPAPELLGGPSVFLFPPKPKDTLMISRTPEVTCVVVDVSHEDPEVKFNWYVDGVEVHNAKTKPCEEQYGSTYRCVSVLTVLHQDWLNGKEYKCKVSNKALPAPIEKTISKAKGQPREPQVYTLPPSREEMTKNQVSLTCLVKGFYPSDIAVEWESNGQPENNYKTTPPVLDSDGSFFLYSKLTVDKSRWQQGNVFSCSVMHEALHNHYTQKSLSLSPGK

SEQ ID NO: 1723 - protein, 986 aa, Artificial Sequence
  Synthetic peptide
EVQLLESGGGLVQPGGSLRLSCAASGFTFSTYAMSWVRQAPGKGLEWVSAISGSGGGTFYAESVKGRFTISRDNSKNTLYLQMNSLRAEDTAVYYCAKHDYSNYPYFDYWGQGTLVTVSSGGGGSGGGGSGGGGSEIVLTQSPGTLSLSPGERATLSCRASQSIRSNYLAWYQQKPGQAPRLLIYGASSRATGIPDRFSGSGSGTDFTLTISRLEPEDFAVYYCQQYGSSPFTFGPGTKVEIKSGGGGSEVQLVESGGGLVQPGGSLKLSCAASGFTFNKYAMNWVRQAPGKGLEWVARIRSKYNNYATYYADSVKDRFTISRDDSKNTAYLQMNNLKTEDTAVYYCVRHGNFGNSYISYWAYWGQGTLVTVSSGGGGSGGGGSGGGGSQTVVTQEPSLTVSPGGTVTLTCGSSTGAVTSGNYPNWVQQKPGQAPRGLIGGTKFLAPGTPARFSGSLLGGKAALTLSGVQPEDEAEYYCVLWYSNRWVFGGGTKLTVLGGGGDKTHTCPPCPAPELLGGPSVFLFPPKPKDTLMISRTPEVTCVVVDVSHEDPEVKFNWYVDGVEVHNAKTKPCEEQYGSTYRCVSVLTVLHQDWLNGKEYKCKVSNKALPAPIEKTISKAKGQPREPQVYTLPPSREEMTKNQVSLTCLVKGFYPSDIAVEWESNGQPENNYKTTPPVLDSDGSFFLYSKLTVDKSRWQQGNVFSCSVMHEALHNHYTQKSLSLSPGKGGGGSGGGGSGGGGSGGGGSGGGGSGGGGSDKTHTCPPCPAPELLGGPSVFLFPPKPKDTLMISRTPEVTCVVVDVSHEDPEVKFNWYVDGVEVHNAKTKPCEEQYGSTYRCVSVLTVLHQDWLNGKEYKCKVSNKALPAPIEKTISKAKGQPREPQVYTLPPSREEMTKNQVSLTCLVKGFYPSDIAVEWESNGQPENNYKTTPPVLDSDGSFFLYSKLTVDKSRWQQGNVFSCSVMHEALHNHYTQKSLSLSPGK

SEQ ID NO: 1724 - protein, 986 aa, Artificial Sequence
  Synthetic peptide
EVQLLESGGGLVQPGGSLRLSCAASGFTFSTYAMSWVRQAPGKCLEWVSLISGSGGRTYYAESVKGRFTISRDNSKNTLYLQMNSLRAEDTAVYYCAKHDYSNYPYFDYWGQGTLVTVSSGGGGSGGGGSGGGGSEIVLTQSPGTLSLSPGERATLSCRASQSVRSNYLAWYQQKPGQAPRLLIYGASNRATGIPDRFSGSGSGTDFTLTISRLEPEDFAVYSCQQYGISPPTFGCGTKVEIKSGGGGSEVQLVESGGGLVQPGGSLKLSCAASGFTFNKYAMNWVRQAPGKGLEWVARIRSKYNNYATYYADSVKDRFTISRDDSKNTAYLQMNNLKTEDTAVYYCVRHGNFGNSYISYWAYWGQGTLVTVSSGGGGSGGGGSGGGGSQTVVTQEPSLTVSPGGTVTLTCGSSTGAVTSGNYPNWVQQKPGQAPRGLIGGTKFLAPGTPARFSGSLLGGKAALTLSGVQPEDEAEYYCVLWYSNRWVFGGGTKLTVLGGGGDKTHTCPPCPAPELLGGPSVFLFPPKPKDTLMISRTPEVTCVVVDVSHEDPEVKFNWYVDGVEVHNAKTKPCEEQYGSTYRCVSVLTVLHQDWLNGKEYKCKVSNKALPAPIEKTISKAKGQPREPQVYTLPPSREEMTKNQVSLTCLVKGFYPSDIAVEWESNGQPENNYKTTPPVLDSDGSFFLYSKLTVDKSRWQQGNVFSCSVMHEALHNHYTQKSLSLSPGKGGGGSGGGGSGGGGSGGGGSGGGGSGGGGSDKTHTCPPCPAPELLGGPSVFLFPPKPKDTLMISRTPEVTCVVVDVSHEDPEVKFNWYVDGVEVHNAKTKPCEEQYGSTYRCVSVLTVLHQDWLNGKEYKCKVSNKALPAPIEKTISKAKGQPREPQVYTLPPSREEMTKNQVSLTCLVKGFYPSDIAVEWESNGQPENNYKTTPPVLDSDGSFFLYSKLTVDKSRWQQGNVFSCSVMHEALHNHYTQKSLSLSPGK

SEQ ID NO: 1725 - protein, 986 aa, Artificial Sequence
  Synthetic peptide
EVQLLESGGGLVQPGGSLRLSCAASGFTFSTYAMSWVRQAPGKGLEWVSLISGSGGRTYYAESVKGRFTISRDNSKNTLYLQMNSLRAEDTAVYYCAKHDYSNYPYFDYWGQGTLVTVSSGGGGSGGGGSGGGGSEIVLTQSPGTLSLSPGERATLSCRASQSVRSNYLAWYQQKPGQAPRLLIYGASNRATGIPDRFSGSGSGTDFTLTISRLEPEDFAVYSCQQYGISPPTFGGGTKVEIKSGGGGSEVQLVESGGGLVQPGGSLKLSCAASGFTFNKYAMNWVRQAPGKGLEWVARIRSKYNNYATYYADSVKDRFTISRDDSKNTAYLQMNNLKTEDTAVYYCVRHGNFGNSYISYWAYWGQGTLVTVSSGGGGSGGGGSGGGGSQTVVTQEPSLTVSPGGTVTLTCGSSTGAVTSGNYPNWVQQKPGQAPRGLIGGTKFLAPGTPARFSGSLLGGKAALTLSGVQPEDEAEYYCVLWYSNRWVFGGGTKLTVLGGGGDKTHTCPPCPAPELLGGPSVFLFPPKPKDTLMISRTPEVTCVVVDVSHEDPEVKFNWYVDGVEVHNAKTKPCEEQYGSTYRCVSVLTVLHQDWLNGKEYKCKVSNKALPAPIEKTISKAKGQPREPQVYTLPPSREEMTKNQVSLTCLVKGFYPSDIAVEWESNGQPENNYKTTPPVLDSDGSFFLYSKLTVDKSRWQQGNVFSCSVMHEALHNHYTQKSLSLSPGKGGGGSGGGGSGGGGSGGGGSGGGGSGGGGSDKTHTCPPCPAPELLGGPSVFLFPPKPKDTLMISRTPEVTCVVVDVSHEDPEVKFNWYVDGVEVHNAKTKPCEEQYGSTYRCVSVLTVLHQDWLNGKEYKCKVSNKALPAPIEKTISKAKGQPREPQVYTLPPSREEMTKNQVSLTCLVKGFYPSDIAVEWESNGQPENNYKTTPPVLDSDGSFFLYSKLTVDKSRWQQGNVFSCSVMHEALHNHYTQKSLSLSPGK

SEQ ID NO: 1726 - protein, 985 aa, Artificial Sequence
  Synthetic peptide
EVQLLESGGGLVQPGGSLRLSCAASGFTFSSYAMSWVRQSPGKCLEWVSAISGSGGRAQYAESVQGRFTVSRDNSKNTLYLQMNSLRAEDTAVYYCAKHDYSNYPYFDYWGQGTLVTVSSGGGGSGGGGSGGGGSEIVLTQSPATLSVSPGERATLSCRASQSVSSNLAWYQQKPGQAPRLLIYGSSSRATGIPDRFSGSGSGTDFTLTISRLEPEDFAVYYCQQYGSSPPPFGCGTKVEIKSGGGGSEVQLVESGGGLVQPGGSLKLSCAASGFTFNKYAMNWVRQAPGKGLEWVARIRSKYNNYATYYADSVKDRFTISRDDSKNTAYLQMNNLKTEDTAVYYCVRHGNFGNSYISYWAYWGQGTLVTVSSGGGGSGGGGSGGGGSQTVVTQEPSLTVSPGGTVTLTCGSSTGAVTSGNYPNWVQQKPGQAPRGLIGGTKFLAPGTPARFSGSLLGGKAALTLSGVQPEDEAEYYCVLWYSNRWVFGGGTKLTVLGGGGDKTHTCPPCPAPELLGGPSVFLFPPKPKDTLMISRTPEVTCVVVDVSHEDPEVKFNWYVDGVEVHNAKTKPCEEQYGSTYRCVSVLTVLHQDWLNGKEYKCKVSNKALPAPIEKTISKAKGQPREPQVYTLPPSREEMTKNQVSLTCLVKGFYPSDIAVEWESNGQPENNYKTTPPVLDSDGSFFLYSKLTVDKSRWQQGNVFSCSVMHEALHNHYTQKSLSLSPGKGGGGSGGGGSGGGGSGGGGSGGGGSGGGGSDKTHTCPPCPAPELLGGPSVFLFPPKPKDTLMISRTPEVTCVVVDVSHEDPEVKFNWYVDGVEVHNAKTKPCEEQYGSTYRCVSVLTVLHQDWLNGKEYKCKVSNKALPAPIEKTISKAKGQPREPQVYTLPPSREEMTKNQVSLTCLVKGFYPSDIAVEWESNGQPENNYKTTPPVLDSDGSFFLYSKLTVDKSRWQQGNVFSCSVMHEALHNHYTQKSLSLSPGK

SEQ ID NO: 1727 - protein, 985 aa, Artificial Sequence
  Synthetic peptide
EVQLLESGGGLVQPGGSLRLSCAASGFTFSSYAMSWVRQSPGKGLEWVSAISGSGGRAQYAESVQGRFTVSRDNSKNTLYLQMNSLRAEDTAVYYCAKHDYSNYPYFDYWGQGTLVTVSSGGGGSGGGGSGGGGSEIVLTQSPATLSVSPGERATLSCRASQSVSSNLAWYQQKPGQAPRLLIYGSSSRATGIPDRFSGSGSGTDFTLTISRLEPEDFAVYYCQQYGSSPPPFGGGTKVEIKSGGGGSEVQLVESGGGLVQPGGSLKLSCAASGFTFNKYAMNWVRQAPGKGLEWVARIRSKYNNYATYYADSVKDRFTISRDDSKNTAYLQMNNLKTEDTAVYYCVRHGNFGNSYISYWAYWGQGTLVTVSSGGGGSGGGGSGGGGSQTVVTQEPSLTVSPGGTVTLTCGSSTGAVTSGNYPNWVQQKPGQAPRGLIGGTKFLAPGTPARFSGSLLGGKAALTLSGVQPEDEAEYYCVLWYSNRWVFGGGTKLTVLGGGGDKTHTCPPCPAPELLGGPSVFLFPPKPKDTLMISRTPEVTCVVVDVSHEDPEVKFNWYVDGVEVHNAKTKPCEEQYGSTYRCVSVLTVLHQDWLNGKEYKCKVSNKALPAPIEKTISKAKGQPREPQVYTLPPSREEMTKNQVSLTCLVKGFYPSDIAVEWESNGQPENNYKTTPPVLDSDGSFFLYSKLTVDKSRWQQGNVFSCSVMHEALHNHYTQKSLSLSPGKGGGGSGGGGSGGGGSGGGGSGGGGSGGGGSDKTHTCPPCPAPELLGGPSVFLFPPKPKDTLMISRTPEVTCVVVDVSHEDPEVKFNWYVDGVEVHNAKTKPCEEQYGSTYRCVSVLTVLHQDWLNGKEYKCKVSNKALPAPIEKTISKAKGQPREPQVYTLPPSREEMTKNQVSLTCLVKGFYPSDIAVEWESNGQPENNYKTTPPVLDSDGSFFLYSKLTVDKSRWQQGNVFSCSVMHEALHNHYTQKSLSLSPGK

SEQ ID NO: 1728 - protein, 986 aa, Artificial Sequence
  Synthetic peptide
EVQLLESGGGMVQPGGSLRLSCAASGFTFSSYAMSWVRQAPGKCLEWVSAISGSGGRTFYAESVEGRFTISRDNSKNTLYLQMNSLRAEDTAVYYCTKHDYSNYPYFDYWGQGTLVTVSSGGGGSGGGGSGGGGSEIVLTQSPGTLSLSPGERATLSCRASQGVRSDYLAWYQQKPGQAPRLLIYGASSRATGIPDRFSGSGSGTDFTLTISRLEPEDFAVYHCQQYGSTPPTFGCGTKVEIKSGGGGSEVQLVESGGGLVQPGGSLKLSCAASGFTFNKYAMNWVRQAPGKGLEWVARIRSKYNNYATYYADSVKDRFTISRDDSKNTAYLQMNNLKTEDTAVYYCVRHGNFGNSYISYWAYWGQGTLVTVSSGGGGSGGGGSGGGGSQTVVTQEPSLTVSPGGTVTLTCGSSTGAVTSGNYPNWVQQKPGQAPRGLIGGTKFLAPGTPARFSGSLLGGKAALTLSGVQPEDEAEYYCVLWYSNRWVFGGGTKLTVLGGGGDKTHTCPPCPAPELLGGPSVFLFPPKPKDTLMISRTPEVTCVVVDVSHEDPEVKFNWYVDGVEVHNAKTKPCEEQYGSTYRCVSVLTVLHQDWLNGKEYKCKVSNKALPAPIEKTISKAKGQPREPQVYTLPPSREEMTKNQVSLTCLVKGFYPSDIAVEWESNGQPENNYKTTPPVLDSDGSFFLYSKLTVDKSRWQQGNVFSCSVMHEALHNHYTQKSLSLSPGKGGGGSGGGGSGGGGSGGGGSGGGGSGGGGSDKTHTCPPCPAPELLGGPSVFLFPPKPKDTLMISRTPEVTCVVVDVSHEDPEVKFNWYVDGVEVHNAKTKPCEEQYGSTYRCVSVLTVLHQDWLNGKEYKCKVSNKALPAPIEKTISKAKGQPREPQVYTLPPSREEMTKNQVSLTCLVKGFYPSDIAVEWESNGQPENNYKTTPPVLDSDGSFFLYSKLTVDKSRWQQGNVFSCSVMHEALHNHYTQKSLSLSPGK

SEQ ID NO: 1729 - protein, 986 aa, Artificial Sequence
  Synthetic peptide
EVQLLESGGGMVQPGGSLRLSCAASGFTFSSYAMSWVRQAPGKGLEWVSAISGSGGRTFYAESVEGRFTISRDNSKNTLYLQMNSLRAEDTAVYYCTKHDYSNYPYFDYWGQGTLVTVSSGGGGSGGGGSGGGGSEIVLTQSPGTLSLSPGERATLSCRASQGVRSDYLAWYQQKPGQAPRLLIYGASSRATGIPDRFSGSGSGTDFTLTISRLEPEDFAVYHCQQYGSTPPTFGGGTKVEIKSGGGGSEVQLVESGGGLVQPGGSLKLSCAASGFTFNKYAMNWVRQAPGKGLEWVARIRSKYNNYATYYADSVKDRFTISRDDSKNTAYLQMNNLKTEDTAVYYCVRHGNFGNSYISYWAYWGQGTLVTVSSGGGGSGGGGSGGGGSQTVVTQEPSLTVSPGGTVTLTCGSSTGAVTSGNYPNWVQQKPGQAPRGLIGGTKFLAPGTPARFSGSLLGGKAALTLSGVQPEDEAEYYCVLWYSNRWVFGGGTKLTVLGGGGDKTHTCPPCPAPELLGGPSVFLFPPKPKDTLMISRTPEVTCVVVDVSHEDPEVKFNWYVDGVEVHNAKTKPCEEQYGSTYRCVSVLTVLHQDWLNGKEYKCKVSNKALPAPIEKTISKAKGQPREPQVYTLPPSREEMTKNQVSLTCLVKGFYPSDIAVEWESNGQPENNYKTTPPVLDSDGSFFLYSKLTVDKSRWQQGNVFSCSVMHEALHNHYTQKSLSLSPGKGGGGSGGGGSGGGGSGGGGSGGGGSGGGGSDKTHTCPPCPAPELLGGPSVFLFPPKPKDTLMISRTPEVTCVVVDVSHEDPEVKFNWYVDGVEVHNAKTKPCEEQYGSTYRCVSVLTVLHQDWLNGKEYKCKVSNKALPAPIEKTISKAKGQPREPQVYTLPPSREEMTKNQVSLTCLVKGFYPSDIAVEWESNGQPENNYKTTPPVLDSDGSFFLYSKLTVDKSRWQQGNVFSCSVMHEALHNHYTQKSLSLSPGK

SEQ ID NO: 1730 - protein, 986 aa, Artificial Sequence
  Synthetic peptide
EVQLLESGGGLVQPGGSLRLSCAASGFTFSSYAMSWVRQAPGKCLEWVSAIGEGGGYTYYAESVKGRFTISRDNSKNTLSLLMNSLRAEDTAVYYCARHDYSNYPYFDYWGQGTLVTVSSGGGGSGGGGSGGGGSEIVLTQSPGTLSLSPGERATLSCRASQGVRSSYFAWYQQKPGQAPRLLIYGASTRATGIPARFSGSGSGTDFTLTISRLEPEDFAVYYCQQYGSSPPTFGCGTKVEIKSGGGGSEVQLVESGGGLVQPGGSLKLSCAASGFTFNKYAMNWVRQAPGKGLEWVARIRSKYNNYATYYADSVKDRFTISRDDSKNTAYLQMNNLKTEDTAVYYCVRHGNFGNSYISYWAYWGQGTLVTVSSGGGGSGGGGSGGGGSQTVVTQEPSLTVSPGGTVTLTCGSSTGAVTSGNYPNWVQQKPGQAPRGLIGGTKFLAPGTPARFSGSLLGGKAALTLSGVQPEDEAEYYCVLWYSNRWVFGGGTKLTVLGGGGDKTHTCPPCPAPELLGGPSVFLFPPKPKDTLMISRTPEVTCVVVDVSHEDPEVKFNWYVDGVEVHNAKTKPCEEQYGSTYRCVSVLTVLHQDWLNGKEYKCKVSNKALPAPIEKTISKAKGQPREPQVYTLPPSREEMTKNQVSLTCLVKGFYPSDIAVEWESNGQPENNYKTTPPVLDSDGSFFLYSKLTVDKSRWQQGNVFSCSVMHEALHNHYTQKSLSLSPGKGGGGSGGGGSGGGGSGGGGSGGGGSGGGGSDKTHTCPPCPAPELLGGPSVFLFPPKPKDTLMISRTPEVTCVVVDVSHEDPEVKFNWYVDGVEVHNAKTKPCEEQYGSTYRCVSVLTVLHQDWLNGKEYKCKVSNKALPAPIEKTISKAKGQPREPQVYTLPPSREEMTKNQVSLTCLVKGFYPSDIAVEWESNGQPENNYKTTPPVLDSDGSFFLYSKLTVDKSRWQQGNVFSCSVMHEALHNHYTQKSLSLSPGK

SEQ ID NO: 1731 - protein, 986 aa, Artificial Sequence
  Synthetic peptide
EVQLLESGGGLVQPGGSLRLSCAASGFTFSSYAMSWVRQAPGKGLEWVSAIGEGGGYTYYAESVKGRFTISRDNSKNTLSLLMNSLRAEDTAVYYCARHDYSNYPYFDYWGQGTLVTVSSGGGGSGGGGSGGGGSEIVLTQSPGTLSLSPGERATLSCRASQGVRSSYFAWYQQKPGQAPRLLIYGASTRATGIPARFSGSGSGTDFTLTISRLEPEDFAVYYCQQYGSSPPTFGQGTKVEIKSGGGGSEVQLVESGGGLVQPGGSLKLSCAASGFTFNKYAMNWVRQAPGKGLEWVARIRSKYNNYATYYADSVKDRFTISRDDSKNTAYLQMNNLKTEDTAVYYCVRHGNFGNSYISYWAYWGQGTLVTVSSGGGGSGGGGSGGGGSQTVVTQEPSLTVSPGGTVTLTCGSSTGAVTSGNYPNWVQQKPGQAPRGLIGGTKFLAPGTPARFSGSLLGGKAALTLSGVQPEDEAEYYCVLWYSNRWVFGGGTKLTVLGGGGDKTHTCPPCPAPELLGGPSVFLFPPKPKDTLMISRTPEVTCVVVDVSHEDPEVKFNWYVDGVEVHNAKTKPCEEQYGSTYRCVSVLTVLHQDWLNGKEYKCKVSNKALPAPIEKTISKAKGQPREPQVYTLPPSREEMTKNQVSLTCLVKGFYPSDIAVEWESNGQPENNYKTTPPVLDSDGSFFLYSKLTVDKSRWQQGNVFSCSVMHEALHNHYTQKSLSLSPGKGGGGSGGGGSGGGGSGGGGSGGGGSGGGGSDKTHTCPPCPAPELLGGPSVFLFPPKPKDTLMISRTPEVTCVVVDVSHEDPEVKFNWYVDGVEVHNAKTKPCEEQYGSTYRCVSVLTVLHQDWLNGKEYKCKVSNKALPAPIEKTISKAKGQPREPQVYTLPPSREEMTKNQVSLTCLVKGFYPSDIAVEWESNGQPENNYKTTPPVLDSDGSFFLYSKLTVDKSRWQQGNVFSCSVMHEALHNHYTQKSLSLSPGK

SEQ ID NO: 1732 - protein, 986 aa, Artificial Sequence
  Synthetic peptide
EVQLLESGGGVVQPGRSLRLSCAASGFTFSSYAMSWVRQAPGKCLEWVSAISGSGGRTFYAESVEGRFTISRDNSKNTLYLQMNSLRAEDTAVYYCAKHDYSNYPYFDYWGQGTLVTVSSGGGGSGGGGSGGGGSEIVLTQSPGTLSLSPGERATLSCRASQSIRSNYLAWYQQKPGQAPRLLIYGASSRATGIPDRFSGSGSGTDFTLTISRLEPEDFAVYYCQQYGSSPPSFGCGTKVEIKSGGGGSEVQLVESGGGLVQPGGSLKLSCAASGFTFNKYAMNWVRQAPGKGLEWVARIRSKYNNYATYYADSVKDRFTISRDDSKNTAYLQMNNLKTEDTAVYYCVRHGNFGNSYISYWAYWGQGTLVTVSSGGGGSGGGGSGGGGSQTVVTQEPSLTVSPGGTVTLTCGSSTGAVTSGNYPNWVQQKPGQAPRGLIGGTKFLAPGTPARFSGSLLGGKAALTLSGVQPEDEAEYYCVLWYSNRWVFGGGTKLTVLGGGGDKTHTCPPCPAPELLGGPSVFLFPPKPKDTLMISRTPEVTCVVVDVSHEDPEVKFNWYVDGVEVHNAKTKPCEEQYGSTYRCVSVLTVLHQDWLNGKEYKCKVSNKALPAPIEKTISKAKGQPREPQVYTLPPSREEMTKNQVSLTCLVKGFYPSDIAVEWESNGQPENNYKTTPPVLDSDGSFFLYSKLTVDKSRWQQGNVFSCSVMHEALHNHYTQKSLSLSPGKGGGGSGGGGSGGGGSGGGGSGGGGSGGGGSDKTHTCPPCPAPELLGGPSVFLFPPKPKDTLMISRTPEVTCVVVDVSHEDPEVKFNWYVDGVEVHNAKTKPCEEQYGSTYRCVSVLTVLHQDWLNGKEYKCKVSNKALPAPIEKTISKAKGQPREPQVYTLPPSREEMTKNQVSLTCLVKGFYPSDIAVEWESNGQPENNYKTTPPVLDSDGSFFLYSKLTVDKSRWQQGNVFSCSVMHEALHNHYTQKSLSLSPGK

SEQ ID NO: 1733 - protein, 986 aa, Artificial Sequence
  Synthetic peptide
EVQLLESGGGVVQPGRSLRLSCAASGFTFSSYAMSWVRQAPGKGLEWVSAISGSGGRTFYAESVEGRFTISRDNSKNTLYLQMNSLRAEDTAVYYCAKHDYSNYPYFDYWGQGTLVTVSSGGGGSGGGGSGGGGSEIVLTQSPGTLSLSPGERATLSCRASQSIRSNYLAWYQQKPGQAPRLLIYGASSRATGIPDRFSGSGSGTDFTLTISRLEPEDFAVYYCQQYGSSPPSFGQGTKVEIKSGGGGSEVQLVESGGGLVQPGGSLKLSCAASGFTFNKYAMNWVRQAPGKGLEWVARIRSKYNNYATYYADSVKDRFTISRDDSKNTAYLQMNNLKTEDTAVYYCVRHGNFGNSYISYWAYWGQGTLVTVSSGGGGSGGGGSGGGGSQTVVTQEPSLTVSPGGTVTLTCGSSTGAVTSGNYPNWVQQKPGQAPRGLIGGTKFLAPGTPARFSGSLLGGKAALTLSGVQPEDEAEYYCVLWYSNRWVFGGGTKLTVLGGGGDKTHTCPPCPAPELLGGPSVFLFPPKPKDTLMISRTPEVTCVVVDVSHEDPEVKFNWYVDGVEVHNAKTKPCEEQYGSTYRCVSVLTVLHQDWLNGKEYKCKVSNKALPAPIEKTISKAKGQPREPQVYTLPPSREEMTKNQVSLTCLVKGFYPSDIAVEWESNGQPENNYKTTPPVLDSDGSFFLYSKLTVDKSRWQQGNVFSCSVMHEALHNHYTQKSLSLSPGKGGGGSGGGGSGGGGSGGGGSGGGGSGGGGSDKTHTCPPCPAPELLGGPSVFLFPPKPKDTLMISRTPEVTCVVVDVSHEDPEVKFNWYVDGVEVHNAKTKPCEEQYGSTYRCVSVLTVLHQDWLNGKEYKCKVSNKALPAPIEKTISKAKGQPREPQVYTLPPSREEMTKNQVSLTCLVKGFYPSDIAVEWESNGQPENNYKTTPPVLDSDGSFFLYSKLTVDKSRWQQGNVFSCSVMHEALHNHYTQKSLSLSPGK

SEQ ID NO: 1734 - protein, 986 aa, Artificial Sequence
  Synthetic peptide
EVQLLESGGGVVQPGRSLRLSCAASGFTFSSYAMSWVRQAPGKCLEWVSAISGSGGGTFYAESVEGRFTISRDNSKNTLYLQMNSLRAEDTAVYYCARHDYSNYPYFDYWGLGTLVTVSSGGGGSGGGGSGGGGSEIVLTQSPGTLSLSPGERATLSCRASQSVRSSYLAWYQQKPGQAPRLLIYGASSRATGIPDRFSGSGSGTDFTLTISRLEPEDFAVYSCQQYGDLPFTFGCGTKVEIKSGGGGSEVQLVESGGGLVQPGGSLKLSCAASGFTFNKYAMNWVRQAPGKGLEWVARIRSKYNNYATYYADSVKDRFTISRDDSKNTAYLQMNNLKTEDTAVYYCVRHGNFGNSYISYWAYWGQGTLVTVSSGGGGSGGGGSGGGGSQTVVTQEPSLTVSPGGTVTLTCGSSTGAVTSGNYPNWVQQKPGQAPRGLIGGTKFLAPGTPARFSGSLLGGKAALTLSGVQPEDEAEYYCVLWYSNRWVFGGGTKLTVLGGGGDKTHTCPPCPAPELLGGPSVFLFPPKPKDTLMISRTPEVTCVVVDVSHEDPEVKFNWYVDGVEVHNAKTKPCEEQYGSTYRCVSVLTVLHQDWLNGKEYKCKVSNKALPAPIEKTISKAKGQPREPQVYTLPPSREEMTKNQVSLTCLVKGFYPSDIAVEWESNGQPENNYKTTPPVLDSDGSFFLYSKLTVDKSRWQQGNVFSCSVMHEALHNHYTQKSLSLSPGKGGGGSGGGGSGGGGSGGGGSGGGGSGGGGSDKTHTCPPCPAPELLGGPSVFLFPPKPKDTLMISRTPEVTCVVVDVSHEDPEVKFNWYVDGVEVHNAKTKPCEEQYGSTYRCVSVLTVLHQDWLNGKEYKCKVSNKALPAPIEKTISKAKGQPREPQVYTLPPSREEMTKNQVSLTCLVKGFYPSDIAVEWESNGQPENNYKTTPPVLDSDGSFFLYSKLTVDKSRWQQGNVFSCSVMHEALHNHYTQKSLSLSPGK

SEQ ID NO: 1735 - protein, 986 aa, Artificial Sequence
  Synthetic peptide
EVQLLESGGGVVQPGRSLRLSCAASGFTFSSYAMSWVRQAPGKGLEWVSAISGSGGGTFYAESVEGRFTISRDNSKNTLYLQMNSLRAEDTAVYYCARHDYSNYPYFDYWGLGTLVTVSSGGGGSGGGGSGGGGSEIVLTQSPGTLSLSPGERATLSCRASQSVRSSYLAWYQQKPGQAPRLLIYGASSRATGIPDRFSGSGSGTDFTLTISRLEPEDFAVYSCQQYGDLPFTFGPGTKVEIKSGGGGSEVQLVESGGGLVQPGGSLKLSCAASGFTFNKYAMNWVRQAPGKGLEWVARIRSKYNNYATYYADSVKDRFTISRDDSKNTAYLQMNNLKTEDTAVYYCVRHGNFGNSYISYWAYWGQGTLVTVSSGGGGSGGGGSGGGGSQTVVTQEPSLTVSPGGTVTLTCGSSTGAVTSGNYPNWVQQKPGQAPRGLIGGTKFLAPGTPARFSGSLLGGKAALTLSGVQPEDEAEYYCVLWYSNRWVFGGGTKLTVLGGGGDKTHTCPPCPAPELLGGPSVFLFPPKPKDTLMISRTPEVTCVVVDVSHEDPEVKFNWYVDGVEVHNAKTKPCEEQYGSTYRCVSVLTVLHQDWLNGKEYKCKVSNKALPAPIEKTISKAKGQPREPQVYTLPPSREEMTKNQVSLTCLVKGFYPSDIAVEWESNGQPENNYKTTPPVLDSDGSFFLYSKLTVDKSRWQQGNVFSCSVMHEALHNHYTQKSLSLSPGKGGGGSGGGGSGGGGSGGGGSGGGGSGGGGSDKTHTCPPCPAPELLGGPSVFLFPPKPKDTLMISRTPEVTCVVVDVSHEDPEVKFNWYVDGVEVHNAKTKPCEEQYGSTYRCVSVLTVLHQDWLNGKEYKCKVSNKALPAPIEKTISKAKGQPREPQVYTLPPSREEMTKNQVSLTCLVKGFYPSDIAVEWESNGQPENNYKTTPPVLDSDGSFFLYSKLTVDKSRWQQGNVFSCSVMHEALHNHYTQKSLSLSPGK

SEQ ID NO: 1736 - protein, 986 aa, Artificial Sequence
  Synthetic peptide
EVQLLESGGGMVQPGGSLRLSCAASGFTFSSYAMSWVRQAPGKCLEWVSAISGSGGRTFYAESVEGRFTISRDNSKNTLYLQMNSLRAEDTAVYYCTKHDYSNYPYFDYWGQGTLVTVSSGGGGSGGGGSGGGGSEIVLTQSPGTLSLSPGERATLSCRASQSVRSSYLAWYQQKPGQAPRLLIYGASSRATGIPDRFSGSGSGTDFTLTISRLEPEDFAVYYCQQYGDLPFTFGCGTKVDIKSGGGGSEVQLVESGGGLVQPGGSLKLSCAASGFTFNKYAMNWVRQAPGKGLEWVARIRSKYNNYATYYADSVKDRFTISRDDSKNTAYLQMNNLKTEDTAVYYCVRHGNFGNSYISYWAYWGQGTLVTVSSGGGGSGGGGSGGGGSQTVVTQEPSLTVSPGGTVTLTCGSSTGAVTSGNYPNWVQQKPGQAPRGLIGGTKFLAPGTPARFSGSLLGGKAALTLSGVQPEDEAEYYCVLWYSNRWVFGGGTKLTVLGGGGDKTHTCPPCPAPELLGGPSVFLFPPKPKDTLMISRTPEVTCVVVDVSHEDPEVKFNWYVDGVEVHNAKTKPCEEQYGSTYRCVSVLTVLHQDWLNGKEYKCKVSNKALPAPIEKTISKAKGQPREPQVYTLPPSREEMTKNQVSLTCLVKGFYPSDIAVEWESNGQPENNYKTTPPVLDSDGSFFLYSKLTVDKSRWQQGNVFSCSVMHEALHNHYTQKSLSLSPGKGGGGSGGGGSGGGGSGGGGSGGGGSGGGGSDKTHTCPPCPAPELLGGPSVFLFPPKPKDTLMISRTPEVTCVVVDVSHEDPEVKFNWYVDGVEVHNAKTKPCEEQYGSTYRCVSVLTVLHQDWLNGKEYKCKVSNKALPAPIEKTISKAKGQPREPQVYTLPPSREEMTKNQVSLTCLVKGFYPSDIAVEWESNGQPENNYKTTPPVLDSDGSFFLYSKLTVDKSRWQQGNVFSCSVMHEALHNHYTQKSLSLSPGK

SEQ ID NO: 1737 - protein, 986 aa, Artificial Sequence
  Synthetic peptide
EVQLLESGGGMVQPGGSLRLSCAASGFTFSSYAMSWVRQAPGKGLEWVSAISGSGGRTFYAESVEGRFTISRDNSKNTLYLQMNSLRAEDTAVYYCTKHDYSNYPYFDYWGQGTLVTVSSGGGGSGGGGSGGGGSEIVLTQSPGTLSLSPGERATLSCRASQSVRSSYLAWYQQKPGQAPRLLIYGASSRATGIPDRFSGSGSGTDFTLTISRLEPEDFAVYYCQQYGDLPFTFGPGTKVDIKSGGGGSEVQLVESGGGLVQPGGSLKLSCAASGFTFNKYAMNWVRQAPGKGLEWVARIRSKYNNYATYYADSVKDRFTISRDDSKNTAYLQMNNLKTEDTAVYYCVRHGNFGNSYISYWAYWGQGTLVTVSSGGGGSGGGGSGGGGSQTVVTQEPSLTVSPGGTVTLTCGSSTGAVTSGNYPNWVQQKPGQAPRGLIGGTKFLAPGTPARFSGSLLGGKAALTLSGVQPEDEAEYYCVLWYSNRWVFGGGTKLTVLGGGGDKTHTCPPCPAPELLGGPSVFLFPPKPKDTLMISRTPEVTCVVVDVSHEDPEVKFNWYVDGVEVHNAKTKPCEEQYGSTYRCVSVLTVLHQDWLNGKEYKCKVSNKALPAPIEKTISKAKGQPREPQVYTLPPSREEMTKNQVSLTCLVKGFYPSDIAVEWESNGQPENNYKTTPPVLDSDGSFFLYSKLTVDKSRWQQGNVFSCSVMHEALHNHYTQKSLSLSPGKGGGGSGGGGSGGGGSGGGGSGGGGSGGGGSDKTHTCPPCPAPELLGGPSVFLFPPKPKDTLMISRTPEVTCVVVDVSHEDPEVKFNWYVDGVEVHNAKTKPCEEQYGSTYRCVSVLTVLHQDWLNGKEYKCKVSNKALPAPIEKTISKAKGQPREPQVYTLPPSREEMTKNQVSLTCLVKGFYPSDIAVEWESNGQPENNYKTTPPVLDSDGSFFLYSKLTVDKSRWQQGNVFSCSVMHEALHNHYTQKSLSLSPGK

SEQ ID NO: 1738 - protein, 986 aa, Artificial Sequence
  Synthetic peptide
EVQLLESGGGLVQPGGSLRLSCAASGFTFSTYAMSWVRQAPGKCLEWVSLISGSGGRTYYAESVKGRFTISRDNSKNTLYLQMNSLRAEDTAVYYCAKHDYSNYPYFDYWGQGTLVTVSSGGGGSGGGGSGGGGSEIVLTQSPGTLSLSPGERATLSCRASQGVRSSYLAWYQQKPGQAPRLLIYGASSRATGIPDRFSGSGSGTDFTLTINRLEPEDFAVYYCQQYGSSPPTFGCGTKVDIKSGGGGSEVQLVESGGGLVQPGGSLKLSCAASGFTFNKYAMNWVRQAPGKGLEWVARIRSKYNNYATYYADSVKDRFTISRDDSKNTAYLQMNNLKTEDTAVYYCVRHGNFGNSYISYWAYWGQGTLVTVSSGGGGSGGGGSGGGGSQTVVTQEPSLTVSPGGTVTLTCGSSTGAVTSGNYPNWVQQKPGQAPRGLIGGTKFLAPGTPARFSGSLLGGKAALTLSGVQPEDEAEYYCVLWYSNRWVFGGGTKLTVLGGGGDKTHTCPPCPAPELLGGPSVFLFPPKPKDTLMISRTPEVTCVVVDVSHEDPEVKFNWYVDGVEVHNAKTKPCEEQYGSTYRCVSVLTVLHQDWLNGKEYKCKVSNKALPAPIEKTISKAKGQPREPQVYTLPPSREEMTKNQVSLTCLVKGFYPSDIAVEWESNGQPENNYKTTPPVLDSDGSFFLYSKLTVDKSRWQQGNVFSCSVMHEALHNHYTQKSLSLSPGKGGGGSGGGGSGGGGSGGGGSGGGGSGGGGSDKTHTCPPCPAPELLGGPSVFLFPPKPKDTLMISRTPEVTCVVVDVSHEDPEVKFNWYVDGVEVHNAKTKPCEEQYGSTYRCVSVLTVLHQDWLNGKEYKCKVSNKALPAPIEKTISKAKGQPREPQVYTLPPSREEMTKNQVSLTCLVKGFYPSDIAVEWESNGQPENNYKTTPPVLDSDGSFFLYSKLTVDKSRWQQGNVFSCSVMHEALHNHYTQKSLSLSPGK

SEQ ID NO: 1739 - protein, 986 aa, Artificial Sequence
  Synthetic peptide
EVQLLESGGGLVQPGGSLRLSCAASGFTFSTYAMSWVRQAPGKGLEWVSLISGSGGRTYYAESVKGRFTISRDNSKNTLYLQMNSLRAEDTAVYYCAKHDYSNYPYFDYWGQGTLVTVSSGGGGSGGGGSGGGGSEIVLTQSPGTLSLSPGERATLSCRASQGVRSSYLAWYQQKPGQAPRLLIYGASSRATGIPDRFSGSGSGTDFTLTINRLEPEDFAVYYCQQYGSSPPTFGGGTKVDIKSGGGGSEVQLVESGGGLVQPGGSLKLSCAASGFTFNKYAMNWVRQAPGKGLEWVARIRSKYNNYATYYADSVKDRFTISRDDSKNTAYLQMNNLKTEDTAVYYCVRHGNFGNSYISYWAYWGQGTLVTVSSGGGGSGGGGSGGGGSQTVVTQEPSLTVSPGGTVTLTCGSSTGAVTSGNYPNWVQQKPGQAPRGLIGGTKFLAPGTPARFSGSLLGGKAALTLSGVQPEDEAEYYCVLWYSNRWVFGGGTKLTVLGGGGDKTHTCPPCPAPELLGGPSVFLFPPKPKDTLMISRTPEVTCVVVDVSHEDPEVKFNWYVDGVEVHNAKTKPCEEQYGSTYRCVSVLTVLHQDWLNGKEYKCKVSNKALPAPIEKTISKAKGQPREPQVYTLPPSREEMTKNQVSLTCLVKGFYPSDIAVEWESNGQPENNYKTTPPVLDSDGSFFLYSKLTVDKSRWQQGNVFSCSVMHEALHNHYTQKSLSLSPGKGGGGSGGGGSGGGGSGGGGSGGGGSGGGGSDKTHTCPPCPAPELLGGPSVFLFPPKPKDTLMISRTPEVTCVVVDVSHEDPEVKFNWYVDGVEVHNAKTKPCEEQYGSTYRCVSVLTVLHQDWLNGKEYKCKVSNKALPAPIEKTISKAKGQPREPQVYTLPPSREEMTKNQVSLTCLVKGFYPSDIAVEWESNGQPENNYKTTPPVLDSDGSFFLYSKLTVDKSRWQQGNVFSCSVMHEALHNHYTQKSLSLSPGK

SEQ ID NO: 1740 - protein, 986 aa, Artificial Sequence
  Synthetic peptide
EVQLLESGGGVVQPGRSLRLSCAASGFTFSSYAMSWVRQAPGKCLEWVSAISGSGGRTFYAESVEGRFTISRDNSKNTLYLQMNSLRAEDTAVYYCAKHDYSNYPYFDYWGQGTLVTVSSGGGGSGGGGSGGGGSEIVLTQSPGTLSLSPGERATLSCRASQSVRSNYLAWYQQKPGQAPRLLIYGASSRATGIPDRFSGSGSGTDFTLTINRLEPEDFAVYYCQQYGSSPPTFGCGTKVDIKSGGGGSEVQLVESGGGLVQPGGSLKLSCAASGFTFNKYAMNWVRQAPGKGLEWVARIRSKYNNYATYYADSVKDRFTISRDDSKNTAYLQMNNLKTEDTAVYYCVRHGNFGNSYISYWAYWGQGTLVTVSSGGGGSGGGGSGGGGSQTVVTQEPSLTVSPGGTVTLTCGSSTGAVTSGNYPNWVQQKPGQAPRGLIGGTKFLAPGTPARFSGSLLGGKAALTLSGVQPEDEAEYYCVLWYSNRWVFGGGTKLTVLGGGGDKTHTCPPCPAPELLGGPSVFLFPPKPKDTLMISRTPEVTCVVVDVSHEDPEVKFNWYVDGVEVHNAKTKPCEEQYGSTYRCVSVLTVLHQDWLNGKEYKCKVSNKALPAPIEKTISKAKGQPREPQVYTLPPSREEMTKNQVSLTCLVKGFYPSDIAVEWESNGQPENNYKTTPPVLDSDGSFFLYSKLTVDKSRWQQGNVFSCSVMHEALHNHYTQKSLSLSPGKGGGGSGGGGSGGGGSGGGGSGGGGSGGGGSDKTHTCPPCPAPELLGGPSVFLFPPKPKDTLMISRTPEVTCVVVDVSHEDPEVKFNWYVDGVEVHNAKTKPCEEQYGSTYRCVSVLTVLHQDWLNGKEYKCKVSNKALPAPIEKTISKAKGQPREPQVYTLPPSREEMTKNQVSLTCLVKGFYPSDIAVEWESNGQPENNYKTTPPVLDSDGSFFLYSKLTVDKSRWQQGNVFSCSVMHEALHNHYTQKSLSLSPGK

SEQ ID NO: 1741 - protein, 986 aa, Artificial Sequence
  Synthetic peptide
EVQLLESGGGVVQPGRSLRLSCAASGFTFSSYAMSWVRQAPGKGLEWVSAISGSGGRTFYAESVEGRFTISRDNSKNTLYLQMNSLRAEDTAVYYCAKHDYSNYPYFDYWGQGTLVTVSSGGGGSGGGGSGGGGSEIVLTQSPGTLSLSPGERATLSCRASQSVRSNYLAWYQQKPGQAPRLLIYGASSRATGIPDRFSGSGSGTDFTLTINRLEPEDFAVYYCQQYGSSPPTFGGGTKVDIKSGGGGSEVQLVESGGGLVQPGGSLKLSCAASGFTFNKYAMNWVRQAPGKGLEWVARIRSKYNNYATYYADSVKDRFTISRDDSKNTAYLQMNNLKTEDTAVYYCVRHGNFGNSYISYWAYWGQGTLVTVSSGGGGSGGGGSGGGGSQTVVTQEPSLTVSPGGTVTLTCGSSTGAVTSGNYPNWVQQKPGQAPRGLIGGTKFLAPGTPARFSGSLLGGKAALTLSGVQPEDEAEYYCVLWYSNRWVFGGGTKLTVLGGGGDKTHTCPPCPAPELLGGPSVFLFPPKPKDTLMISRTPEVTCVVVDVSHEDPEVKFNWYVDGVEVHNAKTKPCEEQYGSTYRCVSVLTVLHQDWLNGKEYKCKVSNKALPAPIEKTISKAKGQPREPQVYTLPPSREEMTKNQVSLTCLVKGFYPSDIAVEWESNGQPENNYKTTPPVLDSDGSFFLYSKLTVDKSRWQQGNVFSCSVMHEALHNHYTQKSLSLSPGKGGGGSGGGGSGGGGSGGGGSGGGGSGGGGSDKTHTCPPCPAPELLGGPSVFLFPPKPKDTLMISRTPEVTCVVVDVSHEDPEVKFNWYVDGVEVHNAKTKPCEEQYGSTYRCVSVLTVLHQDWLNGKEYKCKVSNKALPAPIEKTISKAKGQPREPQVYTLPPSREEMTKNQVSLTCLVKGFYPSDIAVEWESNGQPENNYKTTPPVLDSDGSFFLYSKLTVDKSRWQQGNVFSCSVMHEALHNHYTQKSLSLSPGK

SEQ ID NO: 1742 - protein, 985 aa, Artificial Sequence
  Synthetic peptide
EVQLLESGGGLVQPGGSLRLSCAASGFTFSSYAMSWVRQAPGKCLEWVSVISGSGGITDFAESVKGRFTISRDNSRNTLYLQMNSLRAEDTAVYFCARHDYSNYFFFDYWGQGTLVTVSSGGGGSGGGGSGGGGSDIQMTQSPSSLSASVGDRVTITCRASQGISNYLAWYQQKPGKVPKLLIYAASILQSGVPSKFSGSGSGTDFTLTISSLQPEDFAIYYCQQYFAYPITFGCGTRLEIKSGGGGSEVQLVESGGGLVQPGGSLKLSCAASGFTFNKYAMNWVRQAPGKGLEWVARIRSKYNNYATYYADSVKDRFTISRDDSKNTAYLQMNNLKTEDTAVYYCVRHGNFGNSYISYWAYWGQGTLVTVSSGGGGSGGGGSGGGGSQTVVTQEPSLTVSPGGTVTLTCGSSTGAVTSGNYPNWVQQKPGQAPRGLIGGTKFLAPGTPARFSGSLLGGKAALTLSGVQPEDEAEYYCVLWYSNRWVFGGGTKLTVLGGGGDKTHTCPPCPAPELLGGPSVFLFPPKPKDTLMISRTPEVTCVVVDVSHEDPEVKFNWYVDGVEVHNAKTKPCEEQYGSTYRCVSVLTVLHQDWLNGKEYKCKVSNKALPAPIEKTISKAKGQPREPQVYTLPPSREEMTKNQVSLTCLVKGFYPSDIAVEWESNGQPENNYKTTPPVLDSDGSFFLYSKLTVDKSRWQQGNVFSCSVMHEALHNHYTQKSLSLSPGKGGGGSGGGGSGGGGSGGGGSGGGGSGGGGSDKTHTCPPCPAPELLGGPSVFLFPPKPKDTLMISRTPEVTCVVVDVSHEDPEVKFNWYVDGVEVHNAKTKPCEEQYGSTYRCVSVLTVLHQDWLNGKEYKCKVSNKALPAPIEKTISKAKGQPREPQVYTLPPSREEMTKNQVSLTCLVKGFYPSDIAVEWESNGQPENNYKTTPPVLDSDGSFFLYSKLTVDKSRWQQGNVFSCSVMHEALHNHYTQKSLSLSPGK

SEQ ID NO: 1743 - protein, 985 aa, Artificial Sequence
  Synthetic peptide
EVQLLESGGGLVQPGGSLRLSCAASGFTFSSYAMSWVRQAPGKGLEWVSVISGSGGITDFAESVKGRFTISRDNSRNTLYLQMNSLRAEDTAVYFCARHDYSNYFFFDYWGQGTLVTVSSGGGGSGGGGSGGGGSDIQMTQSPSSLSASVGDRVTITCRASQGISNYLAWYQQKPGKVPKLLIYAASILQSGVPSKFSGSGSGTDFTLTISSLQPEDFAIYYCQQYFAYPITFGQGTRLEIKSGGGGSEVQLVESGGGLVQPGGSLKLSCAASGFTFNKYAMNWVRQAPGKGLEWVARIRSKYNNYATYYADSVKDRFTISRDDSKNTAYLQMNNLKTEDTAVYYCVRHGNFGNSYISYWAYWGQGTLVTVSSGGGGSGGGGSGGGGSQTVVTQEPSLTVSPGGTVTLTCGSSTGAVTSGNYPNWVQQKPGQAPRGLIGGTKFLAPGTPARFSGSLLGGKAALTLSGVQPEDEAEYYCVLWYSNRWVFGGGTKLTVLGGGGDKTHTCPPCPAPELLGGPSVFLFPPKPKDTLMISRTPEVTCVVVDVSHEDPEVKFNWYVDGVEVHNAKTKPCEEQYGSTYRCVSVLTVLHQDWLNGKEYKCKVSNKALPAPIEKTISKAKGQPREPQVYTLPPSREEMTKNQVSLTCLVKGFYPSDIAVEWESNGQPENNYKTTPPVLDSDGSFFLYSKLTVDKSRWQQGNVFSCSVMHEALHNHYTQKSLSLSPGKGGGGSGGGGSGGGGSGGGGSGGGGSGGGGSDKTHTCPPCPAPELLGGPSVFLFPPKPKDTLMISRTPEVTCVVVDVSHEDPEVKFNWYVDGVEVHNAKTKPCEEQYGSTYRCVSVLTVLHQDWLNGKEYKCKVSNKALPAPIEKTISKAKGQPREPQVYTLPPSREEMTKNQVSLTCLVKGFYPSDIAVEWESNGQPENNYKTTPPVLDSDGSFFLYSKLTVDKSRWQQGNVFSCSVMHEALHNHYTQKSLSLSPGK

SEQ ID NO: 1744 - protein, 986 aa, Artificial Sequence
  Synthetic peptide
EVQLLESGGGMVQPGGSLRLSCAASGFTFSSYAMSWVRQAPGKCLEWVSAISGSGGRTFYAESVEGRFTISRDNSKNTLYLQMNSLRAEDTAVYYCAKHDYSNYPYFDYWGQGTLVTVSSGGGGSGGGGSGGGGSEIVLTQSPGTLSLSPGERATLSCRASQSVRSSYLAWYQQKPGQAPRLLIYGASSRATGIPDRFSGSGSGTDFTLTISRLEPEDFAVYFCQQYGSSPPTFGCGTRLEIKSGGGGSEVQLVESGGGLVQPGGSLKLSCAASGFTFNKYAMNWVRQAPGKGLEWVARIRSKYNNYATYYADSVKDRFTISRDDSKNTAYLQMNNLKTEDTAVYYCVRHGNFGNSYISYWAYWGQGTLVTVSSGGGGSGGGGSGGGGSQTVVTQEPSLTVSPGGTVTLTCGSSTGAVTSGNYPNWVQQKPGQAPRGLIGGTKFLAPGTPARFSGSLLGGKAALTLSGVQPEDEAEYYCVLWYSNRWVFGGGTKLTVLGGGGDKTHTCPPCPAPELLGGPSVFLFPPKPKDTLMISRTPEVTCVVVDVSHEDPEVKFNWYVDGVEVHNAKTKPCEEQYGSTYRCVSVLTVLHQDWLNGKEYKCKVSNKALPAPIEKTISKAKGQPREPQVYTLPPSREEMTKNQVSLTCLVKGFYPSDIAVEWESNGQPENNYKTTPPVLDSDGSFFLYSKLTVDKSRWQQGNVFSCSVMHEALHNHYTQKSLSLSPGKGGGGSGGGGSGGGGSGGGGSGGGGSGGGGSDKTHTCPPCPAPELLGGPSVFLFPPKPKDTLMISRTPEVTCVVVDVSHEDPEVKFNWYVDGVEVHNAKTKPCEEQYGSTYRCVSVLTVLHQDWLNGKEYKCKVSNKALPAPIEKTISKAKGQPREPQVYTLPPSREEMTKNQVSLTCLVKGFYPSDIAVEWESNGQPENNYKTTPPVLDSDGSFFLYSKLTVDKSRWQQGNVFSCSVMHEALHNHYTQKSLSLSPGK

SEQ ID NO: 1745 - protein, 986 aa, Artificial Sequence
  Synthetic peptide
EVQLLESGGGMVQPGGSLRLSCAASGFTFSSYAMSWVRQAPGKGLEWVSAISGSGGRTFYAESVEGRFTISRDNSKNTLYLQMNSLRAEDTAVYYCAKHDYSNYPYFDYWGQGTLVTVSSGGGGSGGGGSGGGGSEIVLTQSPGTLSLSPGERATLSCRASQSVRSSYLAWYQQKPGQAPRLLIYGASSRATGIPDRFSGSGSGTDFTLTISRLEPEDFAVYFCQQYGSSPPTFGGGTRLEIKSGGGGSEVQLVESGGGLVQPGGSLKLSCAASGFTFNKYAMNWVRQAPGKGLEWVARIRSKYNNYATYYADSVKDRFTISRDDSKNTAYLQMNNLKTEDTAVYYCVRHGNFGNSYISYWAYWGQGTLVTVSSGGGGSGGGGSGGGGSQTVVTQEPSLTVSPGGTVTLTCGSSTGAVTSGNYPNWVQQKPGQAPRGLIGGTKFLAPGTPARFSGSLLGGKAALTLSGVQPEDEAEYYCVLWYSNRWVFGGGTKLTVLGGGGDKTHTCPPCPAPELLGGPSVFLFPPKPKDTLMISRTPEVTCVVVDVSHEDPEVKFNWYVDGVEVHNAKTKPCEEQYGSTYRCVSVLTVLHQDWLNGKEYKCKVSNKALPAPIEKTISKAKGQPREPQVYTLPPSREEMTKNQVSLTCLVKGFYPSDIAVEWESNGQPENNYKTTPPVLDSDGSFFLYSKLTVDKSRWQQGNVFSCSVMHEALHNHYTQKSLSLSPGKGGGGSGGGGSGGGGSGGGGSGGGGSGGGGSDKTHTCPPCPAPELLGGPSVFLFPPKPKDTLMISRTPEVTCVVVDVSHEDPEVKFNWYVDGVEVHNAKTKPCEEQYGSTYRCVSVLTVLHQDWLNGKEYKCKVSNKALPAPIEKTISKAKGQPREPQVYTLPPSREEMTKNQVSLTCLVKGFYPSDIAVEWESNGQPENNYKTTPPVLDSDGSFFLYSKLTVDKSRWQQGNVFSCSVMHEALHNHYTQKSLSLSPGK

SEQ ID NO: 1746 - protein, 986 aa, Artificial Sequence
  Synthetic peptide
EVQLLESGGGLVQPGGSLRLSCAASGFTFSIYAMSWVRQAPGKCLEWVSAIGGSGGSTFYAESVKGRFTISRDNSKNTLYLQMNSLRAEDTAVYYCAKHDYSNYPYFDYWGQGTLVTVSSGGGGSGGGGSGGGGSEIVLTQSPGTLSLSPGERATLSCRASQSVRSSYVAWYQQKPGQAPRLLIYGASSRATGIPDRFSGSGSGTDFTLTISRLEPEDFAVYYCQQYGDLPFTFGCGTRLEIKSGGGGSEVQLVESGGGLVQPGGSLKLSCAASGFTFNKYAMNWVRQAPGKGLEWVARIRSKYNNYATYYADSVKDRFTISRDDSKNTAYLQMNNLKTEDTAVYYCVRHGNFGNSYISYWAYWGQGTLVTVSSGGGGSGGGGSGGGGSQTVVTQEPSLTVSPGGTVTLTCGSSTGAVTSGNYPNWVQQKPGQAPRGLIGGTKFLAPGTPARFSGSLLGGKAALTLSGVQPEDEAEYYCVLWYSNRWVFGGGTKLTVLGGGGDKTHTCPPCPAPELLGGPSVFLFPPKPKDTLMISRTPEVTCVVVDVSHEDPEVKFNWYVDGVEVHNAKTKPCEEQYGSTYRCVSVLTVLHQDWLNGKEYKCKVSNKALPAPIEKTISKAKGQPREPQVYTLPPSREEMTKNQVSLTCLVKGFYPSDIAVEWESNGQPENNYKTTPPVLDSDGSFFLYSKLTVDKSRWQQGNVFSCSVMHEALHNHYTQKSLSLSPGKGGGGSGGGGSGGGGSGGGGSGGGGSGGGGSDKTHTCPPCPAPELLGGPSVFLFPPKPKDTLMISRTPEVTCVVVDVSHEDPEVKFNWYVDGVEVHNAKTKPCEEQYGSTYRCVSVLTVLHQDWLNGKEYKCKVSNKALPAPIEKTISKAKGQPREPQVYTLPPSREEMTKNQVSLTCLVKGFYPSDIAVEWESNGQPENNYKTTPPVLDSDGSFFLYSKLTVDKSRWQQGNVFSCSVMHEALHNHYTQKSLSLSPGK

SEQ ID NO: 1747 - protein, 986 aa, Artificial Sequence
  Synthetic peptide
EVQLLESGGGLVQPGGSLRLSCAASGFTFSIYAMSWVRQAPGKGLEWVSAIGGSGGSTFYAESVKGRFTISRDNSKNTLYLQMNSLRAEDTAVYYCAKHDYSNYPYFDYWGQGTLVTVSSGGGGSGGGGSGGGGSEIVLTQSPGTLSLSPGERATLSCRASQSVRSSYVAWYQQKPGQAPRLLIYGASSRATGIPDRFSGSGSGTDFTLTISRLEPEDFAVYYCQQYGDLPFTFGPGTRLEIKSGGGGSEVQLVESGGGLVQPGGSLKLSCAASGFTFNKYAMNWVRQAPGKGLEWVARIRSKYNNYATYYADSVKDRFTISRDDSKNTAYLQMNNLKTEDTAVYYCVRHGNFGNSYISYWAYWGQGTLVTVSSGGGGSGGGGSGGGGSQTVVTQEPSLTVSPGGTVTLTCGSSTGAVTSGNYPNWVQQKPGQAPRGLIGGTKFLAPGTPARFSGSLLGGKAALTLSGVQPEDEAEYYCVLWYSNRWVFGGGTKLTVLGGGGDKTHTCPPCPAPELLGGPSVFLFPPKPKDTLMISRTPEVTCVVVDVSHEDPEVKFNWYVDGVEVHNAKTKPCEEQYGSTYRCVSVLTVLHQDWLNGKEYKCKVSNKALPAPIEKTISKAKGQPREPQVYTLPPSREEMTKNQVSLTCLVKGFYPSDIAVEWESNGQPENNYKTTPPVLDSDGSFFLYSKLTVDKSRWQQGNVFSCSVMHEALHNHYTQKSLSLSPGKGGGGSGGGGSGGGGSGGGGSGGGGSGGGGSDKTHTCPPCPAPELLGGPSVFLFPPKPKDTLMISRTPEVTCVVVDVSHEDPEVKFNWYVDGVEVHNAKTKPCEEQYGSTYRCVSVLTVLHQDWLNGKEYKCKVSNKALPAPIEKTISKAKGQPREPQVYTLPPSREEMTKNQVSLTCLVKGFYPSDIAVEWESNGQPENNYKTTPPVLDSDGSFFLYSKLTVDKSRWQQGNVFSCSVMHEALHNHYTQKSLSLSPGK

SEQ ID NO: 1748 - protein, 990 aa, Artificial Sequence; identical to SEQ ID NO: 1629
  Synthetic peptide

SEQ ID NO: 1749 - protein, 990 aa, Artificial Sequence; identical to SEQ ID NO: 1628
  Synthetic peptide

SEQ ID NO: 1750 - protein, 985 aa, Artificial Sequence
  Synthetic peptide
EVQLVESGGGLVKPGGSLRLSCAASGFTFSSYSMNWVRQAPGKCLEWVSYISSSGGYIYYAESVKGRFTISRDNAKNSLYLQMNSLRAEDAAVYYCSRGDYSNYAYFDYWGQGTLVTVSSGGGGSGGGGSGGGGSDIQMTQSPSSLSASVGDRVTITCRASQGISNYLAWYQQKPGKVPKLLIYAASTLQSGVPSRFSGSGSGTDFTLTISSLQAEDVAVYYCQQYYSTPLTFGCGTKVEIKSGGGGSEVQLVESGGGLVQPGGSLKLSCAASGFTFNKYAMNWVRQAPGKGLEWVARIRSKYNNYATYYADSVKDRFTISRDDSKNTAYLQMNNLKTEDTAVYYCVRHGNFGNSYISYWAYWGQGTLVTVSSGGGGSGGGGSGGGGSQTVVTQEPSLTVSPGGTVTLTCGSSTGAVTSGNYPNWVQQKPGQAPRGLIGGTKFLAPGTPARFSGSLLGGKAALTLSGVQPEDEAEYYCVLWYSNRWVFGGGTKLTVLGGGGDKTHTCPPCPAPELLGGPSVFLFPPKPKDTLMISRTPEVTCVVVDVSHEDPEVKFNWYVDGVEVHNAKTKPCEEQYGSTYRCVSVLTVLHQDWLNGKEYKCKVSNKALPAPIEKTISKAKGQPREPQVYTLPPSREEMTKNQVSLTCLVKGFYPSDIAVEWESNGQPENNYKTTPPVLDSDGSFFLYSKLTVDKSRWQQGNVFSCSVMHEALHNHYTQKSLSLSPGKGGGGSGGGGSGGGGSGGGGSGGGGSGGGGSDKTHTCPPCPAPELLGGPSVFLFPPKPKDTLMISRTPEVTCVVVDVSHEDPEVKFNWYVDGVEVHNAKTKPCEEQYGSTYRCVSVLTVLHQDWLNGKEYKCKVSNKALPAPIEKTISKAKGQPREPQVYTLPPSREEMTKNQVSLTCLVKGFYPSDIAVEWESNGQPENNYKTTPPVLDSDGSFFLYSKLTVDKSRWQQGNVFSCSVMHEALHNHYTQKSLSLSPGK

SEQ ID NO: 1751 - protein, 985 aa, Artificial Sequence
  Synthetic peptide
EVQLVESGGGLVKPGGSLRLSCAASGFTFSSYSMNWVRQAPGKGLEWVSYISSSGGYIYYAESVKGRFTISRDNAKNSLYLQMNSLRAEDAAVYYCSRGDYSNYAYFDYWGQGTLVTVSSGGGGSGGGGSGGGGSDIQMTQSPSSLSASVGDRVTITCRASQGISNYLAWYQQKPGKVPKLLIYAASTLQSGVPSRFSGSGSGTDFTLTISSLQAEDVAVYYCQQYYSTPLTFGGGTKVEIKSGGGGSEVQLVESGGGLVQPGGSLKLSCAASGFTFNKYAMNWVRQAPGKGLEWVARIRSKYNNYATYYADSVKDRFTISRDDSKNTAYLQMNNLKTEDTAVYYCVRHGNFGNSYISYWAYWGQGTLVTVSSGGGGSGGGGSGGGGSQTVVTQEPSLTVSPGGTVTLTCGSSTGAVTSGNYPNWVQQKPGQAPRGLIGGTKFLAPGTPARFSGSLLGGKAALTLSGVQPEDEAEYYCVLWYSNRWVFGGGTKLTVLGGGGDKTHTCPPCPAPELLGGPSVFLFPPKPKDTLMISRTPEVTCVVVDVSHEDPEVKFNWYVDGVEVHNAKTKPCEEQYGSTYRCVSVLTVLHQDWLNGKEYKCKVSNKALPAPIEKTISKAKGQPREPQVYTLPPSREEMTKNQVSLTCLVKGFYPSDIAVEWESNGQPENNYKTTPPVLDSDGSFFLYSKLTVDKSRWQQGNVFSCSVMHEALHNHYTQKSLSLSPGKGGGGSGGGGSGGGGSGGGGSGGGGSGGGGSDKTHTCPPCPAPELLGGPSVFLFPPKPKDTLMISRTPEVTCVVVDVSHEDPEVKFNWYVDGVEVHNAKTKPCEEQYGSTYRCVSVLTVLHQDWLNGKEYKCKVSNKALPAPIEKTISKAKGQPREPQVYTLPPSREEMTKNQVSLTCLVKGFYPSDIAVEWESNGQPENNYKTTPPVLDSDGSFFLYSKLTVDKSRWQQGNVFSCSVMHEALHNHYTQKSLSLSPGK

SEQ ID NO: 1752 - protein, 986 aa, Artificial Sequence
  Synthetic peptide
EVQLLESGGGLVQPGGSLRLSCAASGFTFSVYAMSWVRQAPGKCLEWVSTISGSGGSTFYAESVKGRFTISRDNSKNTLYLQMNRLRAEDTAVYYCARHDYSNYAYFDYWGQGTLVTVSSGGGGSGGGGSGGGGSEIVLTQSPGTLSLSPGERATLSCRASQSVRSSYLAWYQQKPGQAPRLLIYGASSRATGIPDRFSGSGSGTDFTLTISRLEPEDFAVYYCQQYGDLPFTFGCGTKVEIKSGGGGSEVQLVESGGGLVQPGGSLKLSCAASGFTFNKYAMNWVRQAPGKGLEWVARIRSKYNNYATYYADSVKDRFTISRDDSKNTAYLQMNNLKTEDTAVYYCVRHGNFGNSYISYWAYWGQGTLVTVSSGGGGSGGGGSGGGGSQTVVTQEPSLTVSPGGTVTLTCGSSTGAVTSGNYPNWVQQKPGQAPRGLIGGTKFLAPGTPARFSGSLLGGKAALTLSGVQPEDEAEYYCVLWYSNRWVFGGGTKLTVLGGGGDKTHTCPPCPAPELLGGPSVFLFPPKPKDTLMISRTPEVTCVVVDVSHEDPEVKFNWYVDGVEVHNAKTKPCEEQYGSTYRCVSVLTVLHQDWLNGKEYKCKVSNKALPAPIEKTISKAKGQPREPQVYTLPPSREEMTKNQVSLTCLVKGFYPSDIAVEWESNGQPENNYKTTPPVLDSDGSFFLYSKLTVDKSRWQQGNVFSCSVMHEALHNHYTQKSLSLSPGKGGGGSGGGGSGGGGSGGGGSGGGGSGGGGSDKTHTCPPCPAPELLGGPSVFLFPPKPKDTLMISRTPEVTCVVVDVSHEDPEVKFNWYVDGVEVHNAKTKPCEEQYGSTYRCVSVLTVLHQDWLNGKEYKCKVSNKALPAPIEKTISKAKGQPREPQVYTLPPSREEMTKNQVSLTCLVKGFYPSDIAVEWESNGQPENNYKTTPPVLDSDGSFFLYSKLTVDKSRWQQGNVFSCSVMHEALHNHYTQKSLSLSPGK

SEQ ID NO: 1753 - protein, 986 aa, Artificial Sequence
  Synthetic peptide
EVQLLESGGGLVQPGGSLRLSCAASGFTFSVYAMSWVRQAPGKGLEWVSTISGSGGSTFYAESVKGRFTISRDNSKNTLYLQMNRLRAEDTAVYYCARHDYSNYAYFDYWGQGTLVTVSSGGGGSGGGGSGGGGSEIVLTQSPGTLSLSPGERATLSCRASQSVRSSYLAWYQQKPGQAPRLLIYGASSRATGIPDRFSGSGSGTDFTLTISRLEPEDFAVYYCQQYGDLPFTFGPGTKVEIKSGGGGSEVQLVESGGGLVQPGGSLKLSCAASGFTFNKYAMNWVRQAPGKGLEWVARIRSKYNNYATYYADSVKDRFTISRDDSKNTAYLQMNNLKTEDTAVYYCVRHGNFGNSYISYWAYWGQGTLVTVSSGGGGSGGGGSGGGGSQTVVTQEPSLTVSPGGTVTLTCGSSTGAVTSGNYPNWVQQKPGQAPRGLIGGTKFLAPGTPARFSGSLLGGKAALTLSGVQPEDEAEYYCVLWYSNRWVFGGGTKLTVLGGGGDKTHTCPPCPAPELLGGPSVFLFPPKPKDTLMISRTPEVTCVVVDVSHEDPEVKFNWYVDGVEVHNAKTKPCEEQYGSTYRCVSVLTVLHQDWLNGKEYKCKVSNKALPAPIEKTISKAKGQPREPQVYTLPPSREEMTKNQVSLTCLVKGFYPSDIAVEWESNGQPENNYKTTPPVLDSDGSFFLYSKLTVDKSRWQQGNVFSCSVMHEALHNHYTQKSLSLSPGKGGGGSGGGGSGGGGSGGGGSGGGGSGGGGSDKTHTCPPCPAPELLGGPSVFLFPPKPKDTLMISRTPEVTCVVVDVSHEDPEVKFNWYVDGVEVHNAKTKPCEEQYGSTYRCVSVLTVLHQDWLNGKEYKCKVSNKALPAPIEKTISKAKGQPREPQVYTLPPSREEMTKNQVSLTCLVKGFYPSDIAVEWESNGQPENNYKTTPPVLDSDGSFFLYSKLTVDKSRWQQGNVFSCSVMHEALHNHYTQKSLSLSPGK

SEQ ID NO: 1754 - protein, 989 aa, Artificial Sequence
  Synthetic peptide
QVQLVESGGGVVQPGRSLRLSCAASGFMFSSYGMHWVRQAPGKCLEWVAVISYEGSNKYYAESVKGRFTISRDNSKNTLYLQMNSLRAEDTAVYYCARGRYYGSGNYNHGMDVWGQGTTVTVSSGGGGSGGGGSGGGGSDIQMTQSPSSLSASVGDRVTITCRASQSISSYLNWYQQKPGKAPKLLIYAASSLQSGVPSRFSGRGSGTDFTLTISSLQPEDFATYYCQQSYSTPFTFGCGTKVEIKSGGGGSEVQLVESGGGLVQPGGSLKLSCAASGFTFNKYAMNWVRQAPGKGLEWVARIRSKYNNYATYYADSVKDRFTISRDDSKNTAYLQMNNLKTEDTAVYYCVRHGNFGNSYISYWAYWGQGTLVTVSSGGGGSGGGGSGGGGSQTVVTQEPSLTVSPGGTVTLTCGSSTGAVTSGNYPNWVQQKPGQAPRGLIGGTKFLAPGTPARFSGSLLGGKAALTLSGVQPEDEAEYYCVLWYSNRWVFGGGTKLTVLGGGGDKTHTCPPCPAPELLGGPSVFLFPPKPKDTLMISRTPEVTCVVVDVSHEDPEVKFNWYVDGVEVHNAKTKPCEEQYGSTYRCVSVLTVLHQDWLNGKEYKCKVSNKALPAPIEKTISKAKGQPREPQVYTLPPSREEMTKNQVSLTCLVKGFYPSDIAVEWESNGQPENNYKTTPPVLDSDGSFFLYSKLTVDKSRWQQGNVFSCSVMHEALHNHYTQKSLSLSPGKGGGGSGGGGSGGGGSGGGGSGGGGSGGGGSDKTHTCPPCPAPELLGGPSVFLFPPKPKDTLMISRTPEVTCVVVDVSHEDPEVKFNWYVDGVEVHNAKTKPCEEQYGSTYRCVSVLTVLHQDWLNGKEYKCKVSNKALPAPIEKTISKAKGQPREPQVYTLPPSREEMTKNQVSLTCLVKGFYPSDIAVEWESNGQPENNYKTTPPVLDSDGSFFLYSKLTVDKSRWQQGNVFSCSVMHEALHNHYTQKSLSLSPGK

SEQ ID NO: 1755 - protein, 989 aa, Artificial Sequence
  Synthetic peptide
QVQLVESGGGVVQPGRSLRLSCAASGFMFSSYGMHWVRQAPGKGLEWVAVISYEGSNKYYAESVKGRFTISRDNSKNTLYLQMNSLRAEDTAVYYCARGRYYGSGNYNHGMDVWGQGTTVTVSSGGGGSGGGGSGGGGSDIQMTQSPSSLSASVGDRVTITCRASQSISSYLNWYQQKPGKAPKLLIYAASSLQSGVPSRFSGRGSGTDFTLTISSLQPEDFATYYCQQSYSTPFTFGPGTKVEIKSGGGGSEVQLVESGGGLVQPGGSLKLSCAASGFTFNKYAMNWVRQAPGKGLEWVARIRSKYNNYATYYADSVKDRFTISRDDSKNTAYLQMNNLKTEDTAVYYCVRHGNFGNSYISYWAYWGQGTLVTVSSGGGGSGGGGSGGGGSQTVVTQEPSLTVSPGGTVTLTCGSSTGAVTSGNYPNWVQQKPGQAPRGLIGGTKFLAPGTPARFSGSLLGGKAALTLSGVQPEDEAEYYCVLWYSNRWVFGGGTKLTVLGGGGDKTHTCPPCPAPELLGGPSVFLFPPKPKDTLMISRTPEVTCVVVDVSHEDPEVKFNWYVDGVEVHNAKTKPCEEQYGSTYRCVSVLTVLHQDWLNGKEYKCKVSNKALPAPIEKTISKAKGQPREPQVYTLPPSREEMTKNQVSLTCLVKGFYPSDIAVEWESNGQPENNYKTTPPVLDSDGSFFLYSKLTVDKSRWQQGNVFSCSVMHEALHNHYTQKSLSLSPGKGGGGSGGGGSGGGGSGGGGSGGGGSGGGGSDKTHTCPPCPAPELLGGPSVFLFPPKPKDTLMISRTPEVTCVVVDVSHEDPEVKFNWYVDGVEVHNAKTKPCEEQYGSTYRCVSVLTVLHQDWLNGKEYKCKVSNKALPAPIEKTISKAKGQPREPQVYTLPPSREEMTKNQVSLTCLVKGFYPSDIAVEWESNGQPENNYKTTPPVLDSDGSFFLYSKLTVDKSRWQQGNVFSCSVMHEALHNHYTQKSLSLSPGK

SEQ ID NO: 1756 - protein, 988 aa, Artificial Sequence
  Synthetic peptide
QVQLVESGGGVVQPGRSLRLSCAASGFTFSSYGMHWVRQAPGKCLEWVAVTWYDASNKYYGDAVKGRFTISRDNSKNTLYLQMNSLRAEDTAVYYCARDLLRGVKGYAMDVWGQGTTVTVSSGGGGSGGGGSGGGGSEIVLTQSPGTLSLSPGERATLSCRASQSLRRIYLAWYQQKPGQAPRLLIYDVFDRATGIPDRFSGGGSGTDFTLTISRLEPEDFAVYYCQQYSESPFTFGCGTKVDIKSGGGGSEVQLVESGGGLVQPGGSLKLSCAASGFTFNKYAMNWVRQAPGKGLEWVARIRSKYNNYATYYADSVKDRFTISRDDSKNTAYLQMNNLKTEDTAVYYCVRHGNFGNSYISYWAYWGQGTLVTVSSGGGGSGGGGSGGGGSQTVVTQEPSLTVSPGGTVTLTCGSSTGAVTSGNYPNWVQQKPGQAPRGLIGGTKFLAPGTPARFSGSLLGGKAALTLSGVQPEDEAEYYCVLWYSNRWVFGGGTKLTVLGGGGDKTHTCPPCPAPELLGGPSVFLFPPKPKDTLMISRTPEVTCVVVDVSHEDPEVKFNWYVDGVEVHNAKTKPCEEQYGSTYRCVSVLTVLHQDWLNGKEYKCKVSNKALPAPIEKTISKAKGQPREPQVYTLPPSREEMTKNQVSLTCLVKGFYPSDIAVEWESNGQPENNYKTTPPVLDSDGSFFLYSKLTVDKSRWQQGNVFSCSVMHEALHNHYTQKSLSLSPGKGGGGSGGGGSGGGGSGGGGSGGGGSGGGGSDKTHTCPPCPAPELLGGPSVFLFPPKPKDTLMISRTPEVTCVVVDVSHEDPEVKFNWYVDGVEVHNAKTKPCEEQYGSTYRCVSVLTVLHQDWLNGKEYKCKVSNKALPAPIEKTISKAKGQPREPQVYTLPPSREEMTKNQVSLTCLVKGFYPSDIAVEWESNGQPENNYKTTPPVLDSDGSFFLYSKLTVDKSRWQQGNVFSCSVMHEALHNHYTQKSLSLSPGK

SEQ ID NO: 1757 - protein, 988 aa, Artificial Sequence
  Synthetic peptide
QVQLVESGGGVVQPGRSLRLSCAASGFTFSSYGMHWVRQAPGKGLEWVAVTWYDASNKYYGDAVKGRFTISRDNSKNTLYLQMNSLRAEDTAVYYCARDLLRGVKGYAMDVWGQGTTVTVSSGGGGSGGGGSGGGGSEIVLTQSPGTLSLSPGERATLSCRASQSLRRIYLAWYQQKPGQAPRLLIYDVFDRATGIPDRFSGGGSGTDFTLTISRLEPEDFAVYYCQQYSESPFTFGPGTKVDIKSGGGGSEVQLVESGGGLVQPGGSLKLSCAASGFTFNKYAMNWVRQAPGKGLEWVARIRSKYNNYATYYADSVKDRFTISRDDSKNTAYLQMNNLKTEDTAVYYCVRHGNFGNSYISYWAYWGQGTLVTVSSGGGGSGGGGSGGGGSQTVVTQEPSLTVSPGGTVTLTCGSSTGAVTSGNYPNWVQQKPGQAPRGLIGGTKFLAPGTPARFSGSLLGGKAALTLSGVQPEDEAEYYCVLWYSNRWVFGGGTKLTVLGGGGDKTHTCPPCPAPELLGGPSVFLFPPKPKDTLMISRTPEVTCVVVDVSHEDPEVKFNWYVDGVEVHNAKTKPCEEQYGSTYRCVSVLTVLHQDWLNGKEYKCKVSNKALPAPIEKTISKAKGQPREPQVYTLPPSREEMTKNQVSLTCLVKGFYPSDIAVEWESNGQPENNYKTTPPVLDSDGSFFLYSKLTVDKSRWQQGNVFSCSVMHEALHNHYTQKSLSLSPGKGGGGSGGGGSGGGGSGGGGSGGGGSGGGGSDKTHTCPPCPAPELLGGPSVFLFPPKPKDTLMISRTPEVTCVVVDVSHEDPEVKFNWYVDGVEVHNAKTKPCEEQYGSTYRCVSVLTVLHQDWLNGKEYKCKVSNKALPAPIEKTISKAKGQPREPQVYTLPPSREEMTKNQVSLTCLVKGFYPSDIAVEWESNGQPENNYKTTPPVLDSDGSFFLYSKLTVDKSRWQQGNVFSCSVMHEALHNHYTQKSLSLSPGK

SEQ ID NO: 1758 - protein, 989 aa, Artificial Sequence
  Synthetic peptide
QVQLVQSGAEVKKPGASVKVSCKASGYTFTSYGISWVRQAPGQCLEWMGWISAYQGYTHYAQKLQGRVTMTTDTSTSTAYMELRSLRSDDTAVYYCARDYGGNDYYGMDVWGQGTTVTVSSGGGGSGGGGSGGGGSQSVLTQPPSASGTPGQRVTISCSGSSSNIGINYVYWYQQLPGTAPKLLIYRSDQRPSGVPDRFSGSKSGTSASLALSGLRSEDEADYYCAAFDESLSGVVFGCGTKLTVLSGGGGSEVQLVESGGGLVQPGGSLKLSCAASGFTFNKYAMNWVRQAPGKGLEWVARIRSKYNNYATYYADSVKDRFTISRDDSKNTAYLQMNNLKTEDTAVYYCVRHGNFGNSYISYWAYWGQGTLVTVSSGGGGSGGGGSGGGGSQTVVTQEPSLTVSPGGTVTLTCGSSTGAVTSGNYPNWVQQKPGQAPRGLIGGTKFLAPGTPARFSGSLLGGKAALTLSGVQPEDEAEYYCVLWYSNRWVFGGGTKLTVLGGGGDKTHTCPPCPAPELLGGPSVFLFPPKPKDTLMISRTPEVTCVVVDVSHEDPEVKFNWYVDGVEVHNAKTKPCEEQYGSTYRCVSVLTVLHQDWLNGKEYKCKVSNKALPAPIEKTISKAKGQPREPQVYTLPPSREEMTKNQVSLTCLVKGFYPSDIAVEWESNGQPENNYKTTPPVLDSDGSFFLYSKLTVDKSRWQQGNVFSCSVMHEALHNHYTQKSLSLSPGKGGGGSGGGGSGGGGSGGGGSGGGGSGGGGSDKTHTCPPCPAPELLGGPSVFLFPPKPKDTLMISRTPEVTCVVVDVSHEDPEVKFNWYVDGVEVHNAKTKPCEEQYGSTYRCVSVLTVLHQDWLNGKEYKCKVSNKALPAPIEKTISKAKGQPREPQVYTLPPSREEMTKNQVSLTCLVKGFYPSDIAVEWESNGQPENNYKTTPPVLDSDGSFFLYSKLTVDKSRWQQGNVFSCSVMHEALHNHYTQKSLSLSPGK

SEQ ID NO: 1759 - protein, 989 aa, Artificial Sequence
  Synthetic peptide
QVQLVQSGAEVKKPGASVKVSCKASGYTFTSYGISWVRQAPGQGLEWMGWISAYQGYTHYAQKLQGRVTMTTDTSTSTAYMELRSLRSDDTAVYYCARDYGGNDYYGMDVWGQGTTVTVSSGGGGSGGGGSGGGGSQSVLTQPPSASGTPGQRVTISCSGSSSNIGINYVYWYQQLPGTAPKLLIYRSDQRPSGVPDRFSGSKSGTSASLALSGLRSEDEADYYCAAFDESLSGVVFGGGTKLTVLSGGGGSEVQLVESGGGLVQPGGSLKLSCAASGFTFNKYAMNWVRQAPGKGLEWVARIRSKYNNYATYYADSVKDRFTISRDDSKNTAYLQMNNLKTEDTAVYYCVRHGNFGNSYISYWAYWGQGTLVTVSSGGGGSGGGGSGGGGSQTVVTQEPSLTVSPGGTVTLTCGSSTGAVTSGNYPNWVQQKPGQAPRGLIGGTKFLAPGTPARFSGSLLGGKAALTLSGVQPEDEAEYYCVLWYSNRWVFGGGTKLTVLGGGGDKTHTCPPCPAPELLGGPSVFLFPPKPKDTLMISRTPEVTCVVVDVSHEDPEVKFNWYVDGVEVHNAKTKPCEEQYGSTYRCVSVLTVLHQDWLNGKEYKCKVSNKALPAPIEKTISKAKGQPREPQVYTLPPSREEMTKNQVSLTCLVKGFYPSDIAVEWESNGQPENNYKTTPPVLDSDGSFFLYSKLTVDKSRWQQGNVFSCSVMHEALHNHYTQKSLSLSPGKGGGGSGGGGSGGGGSGGGGSGGGGSGGGGSDKTHTCPPCPAPELLGGPSVFLFPPKPKDTLMISRTPEVTCVVVDVSHEDPEVKFNWYVDGVEVHNAKTKPCEEQYGSTYRCVSVLTVLHQDWLNGKEYKCKVSNKALPAPIEKTISKAKGQPREPQVYTLPPSREEMTKNQVSLTCLVKGFYPSDIAVEWESNGQPENNYKTTPPVLDSDGSFFLYSKLTVDKSRWQQGNVFSCSVMHEALHNHYTQKSLSLSPGK

SEQ ID NO: 1760 - protein, 986 aa, Artificial Sequence
  Synthetic peptide
QAQLVESGGGVVQPGRSLRLSCAASGFTFSYYGMHWVRQAPGKCLEWVAVIWYDASNKYYADAVKGRFTISRDNSKNTLYLQMNSLRAEDTAVYYCARDREMGSRGDFDYWGQGTLVTVSSGGGGSGGGGSGGGGSDIQMTQSPSSLSASVGDRVTITCRASQGINNYLAWFQQKPGKAPKSLIYAVSILQSGVPSKFSGSGSGTDFTLTISNLQPEDFATYYCQQYNFYPFSFGCGTKVDIKSGGGGSEVQLVESGGGLVQPGGSLKLSCAASGFTFNKYAMNWVRQAPGKGLEWVARIRSKYNNYATYYADSVKDRFTISRDDSKNTAYLQMNNLKTEDTAVYYCVRHGNFGNSYISYWAYWGQGTLVTVSSGGGGSGGGGSGGGGSQTVVTQEPSLTVSPGGTVTLTCGSSTGAVTSGNYPNWVQQKPGQAPRGLIGGTKFLAPGTPARFSGSLLGGKAALTLSGVQPEDEAEYYCVLWYSNRWVFGGGTKLTVLGGGGDKTHTCPPCPAPELLGGPSVFLFPPKPKDTLMISRTPEVTCVVVDVSHEDPEVKFNWYVDGVEVHNAKTKPCEEQYGSTYRCVSVLTVLHQDWLNGKEYKCKVSNKALPAPIEKTISKAKGQPREPQVYTLPPSREEMTKNQVSLTCLVKGFYPSDIAVEWESNGQPENNYKTTPPVLDSDGSFFLYSKLTVDKSRWQQGNVFSCSVMHEALHNHYTQKSLSLSPGKGGGGSGGGGSGGGGSGGGGSGGGGSGGGGSDKTHTCPPCPAPELLGGPSVFLFPPKPKDTLMISRTPEVTCVVVDVSHEDPEVKFNWYVDGVEVHNAKTKPCEEQYGSTYRCVSVLTVLHQDWLNGKEYKCKVSNKALPAPIEKTISKAKGQPREPQVYTLPPSREEMTKNQVSLTCLVKGFYPSDIAVEWESNGQPENNYKTTPPVLDSDGSFFLYSKLTVDKSRWQQGNVFSCSVMHEALHNHYTQKSLSLSPGK

SEQ ID NO: 1761 - protein, 986 aa, Artificial Sequence
  Synthetic peptide
QAQLVESGGGVVQPGRSLRLSCAASGFTFSYYGMHWVRQAPGKGLEWVAVIWYDASNKYYADAVKGRFTISRDNSKNTLYLQMNSLRAEDTAVYYCARDREMGSRGDFDYWGQGTLVTVSSGGGGSGGGGSGGGGSDIQMTQSPSSLSASVGDRVTITCRASQGINNYLAWFQQKPGKAPKSLIYAVSILQSGVPSKFSGSGSGTDFTLTISNLQPEDFATYYCQQYNFYPFSFGQGTKVDIKSGGGGSEVQLVESGGGLVQPGGSLKLSCAASGFTFNKYAMNWVRQAPGKGLEWVARIRSKYNNYATYYADSVKDRFTISRDDSKNTAYLQMNNLKTEDTAVYYCVRHGNFGNSYISYWAYWGQGTLVTVSSGGGGSGGGGSGGGGSQTVVTQEPSLTVSPGGTVTLTCGSSTGAVTSGNYPNWVQQKPGQAPRGLIGGTKFLAPGTPARFSGSLLGGKAALTLSGVQPEDEAEYYCVLWYSNRWVFGGGTKLTVLGGGGDKTHTCPPCPAPELLGGPSVFLFPPKPKDTLMISRTPEVTCVVVDVSHEDPEVKFNWYVDGVEVHNAKTKPCEEQYGSTYRCVSVLTVLHQDWLNGKEYKCKVSNKALPAPIEKTISKAKGQPREPQVYTLPPSREEMTKNQVSLTCLVKGFYPSDIAVEWESNGQPENNYKTTPPVLDSDGSFFLYSKLTVDKSRWQQGNVFSCSVMHEALHNHYTQKSLSLSPGKGGGGSGGGGSGGGGSGGGGSGGGGSGGGGSDKTHTCPPCPAPELLGGPSVFLFPPKPKDTLMISRTPEVTCVVVDVSHEDPEVKFNWYVDGVEVHNAKTKPCEEQYGSTYRCVSVLTVLHQDWLNGKEYKCKVSNKALPAPIEKTISKAKGQPREPQVYTLPPSREEMTKNQVSLTCLVKGFYPSDIAVEWESNGQPENNYKTTPPVLDSDGSFFLYSKLTVDKSRWQQGNVFSCSVMHEALHNHYTQKSLSLSPGK

SEQ ID NO: 1762 - protein, 983 aa, Artificial Sequence
  Synthetic peptide
QVQLQQWGAGLLKPSETLSLTCAVYGGSFSGFYWSWIRQPPGKCLEWIGEIYHSGHATNNPSLKSRVTISLDTSKNQFSLKLNSVTAADTAVYYCARGGNSGYIFDYWGQGTLVTVSSGGGGSGGGGSGGGGSDVQMTQSPSSLSASVGDRVTITCRTSQYIGRYLNWYQQKPGKAPKVLIYGASTLQQGVPSRFSGSGSGTDFTLTITSLQPEDFASYYCQQTYSTPRTFGCGTKVEIKSGGGGSEVQLVESGGGLVQPGGSLKLSCAASGFTFNKYAMNWVRQAPGKGLEWVARIRSKYNNYATYYADSVKDRFTISRDDSKNTAYLQMNNLKTEDTAVYYCVRHGNFGNSYISYWAYWGQGTLVTVSSGGGGSGGGGSGGGGSQTVVTQEPSLTVSPGGTVTLTCGSSTGAVTSGNYPNWVQQKPGQAPRGLIGGTKFLAPGTPARFSGSLLGGKAALTLSGVQPEDEAEYYCVLWYSNRWVFGGGTKLTVLGGGGDKTHTCPPCPAPELLGGPSVFLFPPKPKDTLMISRTPEVTCVVVDVSHEDPEVKFNWYVDGVEVHNAKTKPCEEQYGSTYRCVSVLTVLHQDWLNGKEYKCKVSNKALPAPIEKTISKAKGQPREPQVYTLPPSREEMTKNQVSLTCLVKGFYPSDIAVEWESNGQPENNYKTTPPVLDSDGSFFLYSKLTVDKSRWQQGNVFSCSVMHEALHNHYTQKSLSLSPGKGGGGSGGGGSGGGGSGGGGSGGGGSGGGGSDKTHTCPPCPAPELLGGPSVFLFPPKPKDTLMISRTPEVTCVVVDVSHEDPEVKFNWYVDGVEVHNAKTKPCEEQYGSTYRCVSVLTVLHQDWLNGKEYKCKVSNKALPAPIEKTISKAKGQPREPQVYTLPPSREEMTKNQVSLTCLVKGFYPSDIAVEWESNGQPENNYKTTPPVLDSDGSFFLYSKLTVDKSRWQQGNVFSCSVMHEALHNHYTQKSLSLSPGK

SEQ ID NO: 1763 - protein, 983 aa, Artificial Sequence
  Synthetic peptide
QVQLQQWGAGLLKPSETLSLTCAVYGGSFSGFYWSWIRQPPGKGLEWIGEIYHSGHATNNPSLKSRVTISLDTSKNQFSLKLNSVTAADTAVYYCARGGNSGYIFDYWGQGTLVTVSSGGGGSGGGGSGGGGSDVQMTQSPSSLSASVGDRVTITCRTSQYIGRYLNWYQQKPGKAPKVLIYGASTLQQGVPSRFSGSGSGTDFTLTITSLQPEDFASYYCQQTYSTPRTFGQGTKVEIKSGGGGSEVQLVESGGGLVQPGGSLKLSCAASGFTFNKYAMNWVRQAPGKGLEWVARIRSKYNNYATYYADSVKDRFTISRDDSKNTAYLQMNNLKTEDTAVYYCVRHGNFGNSYISYWAYWGQGTLVTVSSGGGGSGGGGSGGGGSQTVVTQEPSLTVSPGGTVTLTCGSSTGAVTSGNYPNWVQQKPGQAPRGLIGGTKFLAPGTPARFSGSLLGGKAALTLSGVQPEDEAEYYCVLWYSNRWVFGGGTKLTVLGGGGDKTHTCPPCPAPELLGGPSVFLFPPKPKDTLMISRTPEVTCVVVDVSHEDPEVKFNWYVDGVEVHNAKTKPCEEQYGSTYRCVSVLTVLHQDWLNGKEYKCKVSNKALPAPIEKTISKAKGQPREPQVYTLPPSREEMTKNQVSLTCLVKGFYPSDIAVEWESNGQPENNYKTTPPVLDSDGSFFLYSKLTVDKSRWQQGNVFSCSVMHEALHNHYTQKSLSLSPGKGGGGSGGGGSGGGGSGGGGSGGGGSGGGGSDKTHTCPPCPAPELLGGPSVFLFPPKPKDTLMISRTPEVTCVVVDVSHEDPEVKFNWYVDGVEVHNAKTKPCEEQYGSTYRCVSVLTVLHQDWLNGKEYKCKVSNKALPAPIEKTISKAKGQPREPQVYTLPPSREEMTKNQVSLTCLVKGFYPSDIAVEWESNGQPENNYKTTPPVLDSDGSFFLYSKLTVDKSRWQQGNVFSCSVMHEALHNHYTQKSLSLSPGK

SEQ ID NO: 1764 - protein, 989 aa, Artificial Sequence
  Synthetic peptide
QVQLVESGGGVVQPGRSLRLSCAASGFTFSTYGMHWVRQAPGKCLEWVAVIWYEGSNKYYGESVKGRFTISRDNSKNTLYLQMNSLRAEDTAVYYCARDNSHYYYGMDVWGQGTTVTVSSGGGGSGGGGSGGGGSQSVLTQPPSVSGAPGQRVTISCTGSSSNIGAGYDVNWYQQFPGTAPKLLIYVNNNRPSGVPDRFSGSTSGTSASLAITGLQAEDEADYYCQSYDTSLSASVFGCGTRLTVLSGGGGSEVQLVESGGGLVQPGGSLKLSCAASGFTFNKYAMNWVRQAPGKGLEWVARIRSKYNNYATYYADSVKDRFTISRDDSKNTAYLQMNNLKTEDTAVYYCVRHGNFGNSYISYWAYWGQGTLVTVSSGGGGSGGGGSGGGGSQTVVTQEPSLTVSPGGTVTLTCGSSTGAVTSGNYPNWVQQKPGQAPRGLIGGTKFLAPGTPARFSGSLLGGKAALTLSGVQPEDEAEYYCVLWYSNRWVFGGGTKLTVLGGGGDKTHTCPPCPAPELLGGPSVFLFPPKPKDTLMISRTPEVTCVVVDVSHEDPEVKFNWYVDGVEVHNAKTKPCEEQYGSTYRCVSVLTVLHQDWLNGKEYKCKVSNKALPAPIEKTISKAKGQPREPQVYTLPPSREEMTKNQVSLTCLVKGFYPSDIAVEWESNGQPENNYKTTPPVLDSDGSFFLYSKLTVDKSRWQQGNVFSCSVMHEALHNHYTQKSLSLSPGKGGGGSGGGGSGGGGSGGGGSGGGGSGGGGSDKTHTCPPCPAPELLGGPSVFLFPPKPKDTLMISRTPEVTCVVVDVSHEDPEVKFNWYVDGVEVHNAKTKPCEEQYGSTYRCVSVLTVLHQDWLNGKEYKCKVSNKALPAPIEKTISKAKGQPREPQVYTLPPSREEMTKNQVSLTCLVKGFYPSDIAVEWESNGQPENNYKTTPPVLDSDGSFFLYSKLTVDKSRWQQGNVFSCSVMHEALHNHYTQKSLSLSPGK

SEQ ID NO: 1765 - protein, 989 aa, Artificial Sequence
  Synthetic peptide
QVQLVESGGGVVQPGRSLRLSCAASGFTFSTYGMHWVRQAPGKGLEWVAVIWYEGSNKYYGESVKGRFTISRDNSKNTLYLQMNSLRAEDTAVYYCARDNSHYYYGMDVWGQGTTVTVSSGGGGSGGGGSGGGGSQSVLTQPPSVSGAPGQRVTISCTGSSSNIGAGYDVNWYQQFPGTAPKLLIYVNNNRPSGVPDRFSGSTSGTSASLAITGLQAEDEADYYCQSYDTSLSASVFGGGTRLTVLSGGGGSEVQLVESGGGLVQPGGSLKLSCAASGFTFNKYAMNWVRQAPGKGLEWVARIRSKYNNYATYYADSVKDRFTISRDDSKNTAYLQMNNLKTEDTAVYYCVRHGNFGNSYISYWAYWGQGTLVTVSSGGGGSGGGGSGGGGSQTVVTQEPSLTVSPGGTVTLTCGSSTGAVTSGNYPNWVQQKPGQAPRGLIGGTKFLAPGTPARFSGSLLGGKAALTLSGVQPEDEAEYYCVLWYSNRWVFGGGTKLTVLGGGGDKTHTCPPCPAPELLGGPSVFLFPPKPKDTLMISRTPEVTCVVVDVSHEDPEVKFNWYVDGVEVHNAKTKPCEEQYGSTYRCVSVLTVLHQDWLNGKEYKCKVSNKALPAPIEKTISKAKGQPREPQVYTLPPSREEMTKNQVSLTCLVKGFYPSDIAVEWESNGQPENNYKTTPPVLDSDGSFFLYSKLTVDKSRWQQGNVFSCSVMHEALHNHYTQKSLSLSPGKGGGGSGGGGSGGGGSGGGGSGGGGSGGGGSDKTHTCPPCPAPELLGGPSVFLFPPKPKDTLMISRTPEVTCVVVDVSHEDPEVKFNWYVDGVEVHNAKTKPCEEQYGSTYRCVSVLTVLHQDWLNGKEYKCKVSNKALPAPIEKTISKAKGQPREPQVYTLPPSREEMTKNQVSLTCLVKGFYPSDIAVEWESNGQPENNYKTTPPVLDSDGSFFLYSKLTVDKSRWQQGNVFSCSVMHEALHNHYTQKSLSLSPGK

SEQ ID NO: 1766 - protein, 989 aa, Artificial Sequence
  Synthetic peptide
QVQLVESGGGVVQPGRSLRLSCAASGFTFSTYGMHWVRQAPGKCLEWVAVIWYEGSNKYYGESVKGRFTISRDNSKNTLYLQMNSLRAEDTAVYYCARDNSHYYYGMDVWGQGTLVTVSSGGGGSGGGGSGGGGSQSVLTQPPSVSGAPGQRVTISCTGSSSNIGAGYDVNWYQQLPGTAPKLLIYVNNNRPSGVPDRFSGSKSGTSASLAITGLQAEDEADYYCQSYETSLSASVFGCGTRLTVLSGGGGSEVQLVESGGGLVQPGGSLKLSCAASGFTFNKYAMNWVRQAPGKGLEWVARIRSKYNNYATYYADSVKDRFTISRDDSKNTAYLQMNNLKTEDTAVYYCVRHGNFGNSYISYWAYWGQGTLVTVSSGGGGSGGGGSGGGGSQTVVTQEPSLTVSPGGTVTLTCGSSTGAVTSGNYPNWVQQKPGQAPRGLIGGTKFLAPGTPARFSGSLLGGKAALTLSGVQPEDEAEYYCVLWYSNRWVFGGGTKLTVLGGGGDKTHTCPPCPAPELLGGPSVFLFPPKPKDTLMISRTPEVTCVVVDVSHEDPEVKFNWYVDGVEVHNAKTKPCEEQYGSTYRCVSVLTVLHQDWLNGKEYKCKVSNKALPAPIEKTISKAKGQPREPQVYTLPPSREEMTKNQVSLTCLVKGFYPSDIAVEWESNGQPENNYKTTPPVLDSDGSFFLYSKLTVDKSRWQQGNVFSCSVMHEALHNHYTQKSLSLSPGKGGGGSGGGGSGGGGSGGGGSGGGGSGGGGSDKTHTCPPCPAPELLGGPSVFLFPPKPKDTLMISRTPEVTCVVVDVSHEDPEVKFNWYVDGVEVHNAKTKPCEEQYGSTYRCVSVLTVLHQDWLNGKEYKCKVSNKALPAPIEKTISKAKGQPREPQVYTLPPSREEMTKNQVSLTCLVKGFYPSDIAVEWESNGQPENNYKTTPPVLDSDGSFFLYSKLTVDKSRWQQGNVFSCSVMHEALHNHYTQKSLSLSPGK

SEQ ID NO: 1767 - protein, 989 aa, Artificial Sequence
  Synthetic peptide
QVQLVESGGGVVQPGRSLRLSCAASGFTFSTYGMHWVRQAPGKGLEWVAVIWYEGSNKYYGESVKGRFTISRDNSKNTLYLQMNSLRAEDTAVYYCARDNSHYYYGMDVWGQGTLVTVSSGGGGSGGGGSGGGGSQSVLTQPPSVSGAPGQRVTISCTGSSSNIGAGYDVNWYQQLPGTAPKLLIYVNNNRPSGVPDRFSGSKSGTSASLAITGLQAEDEADYYCQSYETSLSASVFGGGTRLTVLSGGGGSEVQLVESGGGLVQPGGSLKLSCAASGFTFNKYAMNWVRQAPGKGLEWVARIRSKYNNYATYYADSVKDRFTISRDDSKNTAYLQMNNLKTEDTAVYYCVRHGNFGNSYISYWAYWGQGTLVTVSSGGGGSGGGGSGGGGSQTVVTQEPSLTVSPGGTVTLTCGSSTGAVTSGNYPNWVQQKPGQAPRGLIGGTKFLAPGTPARFSGSLLGGKAALTLSGVQPEDEAEYYCVLWYSNRWVFGGGTKLTVLGGGGDKTHTCPPCPAPELLGGPSVFLFPPKPKDTLMISRTPEVTCVVVDVSHEDPEVKFNWYVDGVEVHNAKTKPCEEQYGSTYRCVSVLTVLHQDWLNGKEYKCKVSNKALPAPIEKTISKAKGQPREPQVYTLPPSREEMTKNQVSLTCLVKGFYPSDIAVEWESNGQPENNYKTTPPVLDSDGSFFLYSKLTVDKSRWQQGNVFSCSVMHEALHNHYTQKSLSLSPGKGGGGSGGGGSGGGGSGGGGSGGGGSGGGGSDKTHTCPPCPAPELLGGPSVFLFPPKPKDTLMISRTPEVTCVVVDVSHEDPEVKFNWYVDGVEVHNAKTKPCEEQYGSTYRCVSVLTVLHQDWLNGKEYKCKVSNKALPAPIEKTISKAKGQPREPQVYTLPPSREEMTKNQVSLTCLVKGFYPSDIAVEWESNGQPENNYKTTPPVLDSDGSFFLYSKLTVDKSRWQQGNVFSCSVMHEALHNHYTQKSLSLSPGK

SEQ ID NO: 1768 - protein, 985 aa, Artificial Sequence
  Synthetic peptide
QMQLQESGPGLVKPSETLSLTCTVSGGSIESGVYYWSWIRQPPGKCLEWIGYIYYSGSTSYNPSLKSRLTMSVDTSKNQFSLKLSSVTAADTAVYYCARSGYSYALFDYWGQGTLVTVSSGGGGSGGGGSGGGGSDIQMTQSPSSLSASLGDRVTITCRASQSVDRYFNWYQQKPGKAPKVLIFAASSLQSGVPSRFSGSGSGTDFTLTISSLQPEDFATYYCQQSYSTPWTFGCGTKVEVKSGGGGSEVQLVESGGGLVQPGGSLKLSCAASGFTFNKYAMNWVRQAPGKGLEWVARIRSKYNNYATYYADSVKDRFTISRDDSKNTAYLQMNNLKTEDTAVYYCVRHGNFGNSYISYWAYWGQGTLVTVSSGGGGSGGGGSGGGGSQTVVTQEPSLTVSPGGTVTLTCGSSTGAVTSGNYPNWVQQKPGQAPRGLIGGTKFLAPGTPARFSGSLLGGKAALTLSGVQPEDEAEYYCVLWYSNRWVFGGGTKLTVLGGGGDKTHTCPPCPAPELLGGPSVFLFPPKPKDTLMISRTPEVTCVVVDVSHEDPEVKFNWYVDGVEVHNAKTKPCEEQYGSTYRCVSVLTVLHQDWLNGKEYKCKVSNKALPAPIEKTISKAKGQPREPQVYTLPPSREEMTKNQVSLTCLVKGFYPSDIAVEWESNGQPENNYKTTPPVLDSDGSFFLYSKLTVDKSRWQQGNVFSCSVMHEALHNHYTQKSLSLSPGKGGGGSGGGGSGGGGSGGGGSGGGGSGGGGSDKTHTCPPCPAPELLGGPSVFLFPPKPKDTLMISRTPEVTCVVVDVSHEDPEVKFNWYVDGVEVHNAKTKPCEEQYGSTYRCVSVLTVLHQDWLNGKEYKCKVSNKALPAPIEKTISKAKGQPREPQVYTLPPSREEMTKNQVSLTCLVKGFYPSDIAVEWESNGQPENNYKTTPPVLDSDGSFFLYSKLTVDKSRWQQGNVFSCSVMHEALHNHYTQKSLSLSPGK

SEQ ID NO: 1769 - protein, 985 aa, Artificial Sequence
  Synthetic peptide
QMQLQESGPGLVKPSETLSLTCTVSGGSIESGVYYWSWIRQPPGKGLEWIGYIYYSGSTSYNPSLKSRLTMSVDTSKNQFSLKLSSVTAADTAVYYCARSGYSYALFDYWGQGTLVTVSSGGGGSGGGGSGGGGSDIQMTQSPSSLSASLGDRVTITCRASQSVDRYFNWYQQKPGKAPKVLIFAASSLQSGVPSRFSGSGSGTDFTLTISSLQPEDFATYYCQQSYSTPWTFGQGTKVEVKSGGGGSEVQLVESGGGLVQPGGSLKLSCAASGFTFNKYAMNWVRQAPGKGLEWVARIRSKYNNYATYYADSVKDRFTISRDDSKNTAYLQMNNLKTEDTAVYYCVRHGNFGNSYISYWAYWGQGTLVTVSSGGGGSGGGGSGGGGSQTVVTQEPSLTVSPGGTVTLTCGSSTGAVTSGNYPNWVQQKPGQAPRGLIGGTKFLAPGTPARFSGSLLGGKAALTLSGVQPEDEAEYYCVLWYSNRWVFGGGTKLTVLGGGGDKTHTCPPCPAPELLGGPSVFLFPPKPKDTLMISRTPEVTCVVVDVSHEDPEVKFNWYVDGVEVHNAKTKPCEEQYGSTYRCVSVLTVLHQDWLNGKEYKCKVSNKALPAPIEKTISKAKGQPREPQVYTLPPSREEMTKNQVSLTCLVKGFYPSDIAVEWESNGQPENNYKTTPPVLDSDGSFFLYSKLTVDKSRWQQGNVFSCSVMHEALHNHYTQKSLSLSPGKGGGGSGGGGSGGGGSGGGGSGGGGSGGGGSDKTHTCPPCPAPELLGGPSVFLFPPKPKDTLMISRTPEVTCVVVDVSHEDPEVKFNWYVDGVEVHNAKTKPCEEQYGSTYRCVSVLTVLHQDWLNGKEYKCKVSNKALPAPIEKTISKAKGQPREPQVYTLPPSREEMTKNQVSLTCLVKGFYPSDIAVEWESNGQPENNYKTTPPVLDSDGSFFLYSKLTVDKSRWQQGNVFSCSVMHEALHNHYTQKSLSLSPGK

SEQ ID NO: 1770 - protein, 985 aa, Artificial Sequence
  Synthetic peptide
QVQLQESGPGLVKPSQTLSLTCTVSGDSIISGGYYWSWIRQPPGKCLEWIGYIFYSGSTDYNPSLKSRVTISVDTSKNQFSLKLSSVTAADTAVYYCARSGYSYALFDAWGQGTLVTVSSGGGGSGGGGSGGGGSDIQMTQSPSSLSASVGDRVTISCRASQFIGRYFNWYQQKPGKAPKVLIYAESSLQSGVPSRFSGSGSGTEFTLTISSLQPEDFATYYCQQSYSTPWTFGCGTKVEIKSGGGGSEVQLVESGGGLVQPGGSLKLSCAASGFTFNKYAMNWVRQAPGKGLEWVARIRSKYNNYATYYADSVKDRFTISRDDSKNTAYLQMNNLKTEDTAVYYCVRHGNFGNSYISYWAYWGQGTLVTVSSGGGGSGGGGSGGGGSQTVVTQEPSLTVSPGGTVTLTCGSSTGAVTSGNYPNWVQQKPGQAPRGLIGGTKFLAPGTPARFSGSLLGGKAALTLSGVQPEDEAEYYCVLWYSNRWVFGGGTKLTVLGGGGDKTHTCPPCPAPELLGGPSVFLFPPKPKDTLMISRTPEVTCVVVDVSHEDPEVKFNWYVDGVEVHNAKTKPCEEQYGSTYRCVSVLTVLHQDWLNGKEYKCKVSNKALPAPIEKTISKAKGQPREPQVYTLPPSREEMTKNQVSLTCLVKGFYPSDIAVEWESNGQPENNYKTTPPVLDSDGSFFLYSKLTVDKSRWQQGNVFSCSVMHEALHNHYTQKSLSLSPGKGGGGSGGGGSGGGGSGGGGSGGGGSGGGGSDKTHTCPPCPAPELLGGPSVFLFPPKPKDTLMISRTPEVTCVVVDVSHEDPEVKFNWYVDGVEVHNAKTKPCEEQYGSTYRCVSVLTVLHQDWLNGKEYKCKVSNKALPAPIEKTISKAKGQPREPQVYTLPPSREEMTKNQVSLTCLVKGFYPSDIAVEWESNGQPENNYKTTPPVLDSDGSFFLYSKLTVDKSRWQQGNVFSCSVMHEALHNHYTQKSLSLSPGK

SEQ ID NO: 1771 - protein, 985 aa, Artificial Sequence
  Synthetic peptide
QVQLQESGPGLVKPSQTLSLTCTVSGDSIISGGYYWSWIRQPPGKGLEWIGYIFYSGSTDYNPSLKSRVTISVDTSKNQFSLKLSSVTAADTAVYYCARSGYSYALFDAWGQGTLVTVSSGGGGSGGGGSGGGGSDIQMTQSPSSLSASVGDRVTISCRASQFIGRYFNWYQQKPGKAPKVLIYAESSLQSGVPSRFSGSGSGTEFTLTISSLQPEDFATYYCQQSYSTPWTFGQGTKVEIKSGGGGSEVQLVESGGGLVQPGGSLKLSCAASGFTFNKYAMNWVRQAPGKGLEWVARIRSKYNNYATYYADSVKDRFTISRDDSKNTAYLQMNNLKTEDTAVYYCVRHGNFGNSYISYWAYWGQGTLVTVSSGGGGSGGGGSGGGGSQTVVTQEPSLTVSPGGTVTLTCGSSTGAVTSGNYPNWVQQKPGQAPRGLIGGTKFLAPGTPARFSGSLLGGKAALTLSGVQPEDEAEYYCVLWYSNRWVFGGGTKLTVLGGGGDKTHTCPPCPAPELLGGPSVFLFPPKPKDTLMISRTPEVTCVVVDVSHEDPEVKFNWYVDGVEVHNAKTKPCEEQYGSTYRCVSVLTVLHQDWLNGKEYKCKVSNKALPAPIEKTISKAKGQPREPQVYTLPPSREEMTKNQVSLTCLVKGFYPSDIAVEWESNGQPENNYKTTPPVLDSDGSFFLYSKLTVDKSRWQQGNVFSCSVMHEALHNHYTQKSLSLSPGKGGGGSGGGGSGGGGSGGGGSGGGGSGGGGSDKTHTCPPCPAPELLGGPSVFLFPPKPKDTLMISRTPEVTCVVVDVSHEDPEVKFNWYVDGVEVHNAKTKPCEEQYGSTYRCVSVLTVLHQDWLNGKEYKCKVSNKALPAPIEKTISKAKGQPREPQVYTLPPSREEMTKNQVSLTCLVKGFYPSDIAVEWESNGQPENNYKTTPPVLDSDGSFFLYSKLTVDKSRWQQGNVFSCSVMHEALHNHYTQKSLSLSPGK

SEQ ID NO: 1772 - protein, 984 aa, Artificial Sequence
  Synthetic peptide
EVQLLESGGGLVQPGGSLRLSCAASGFTFSSYAMSWVRQAPGKCLEWVSVISGSGGRPNYAESVKGRFTISRDNSKNTLYLQMNSLRDEDTAVYYCAKVDYSNYLFFDYWGQGTLVTVSSGGGGSGGGGSGGGGSEIVLTQSPGTLSLSPGEGATLSCRAGQSVRSSYLGWYQQKPGQAPRLLIYGASSRATGIPDRFSGSGSGTDFTLTISRLEPEDFAVYYCQQYGYSPPTFGCGTKLEIKSGGGGSEVQLVESGGGLVQPGGSLKLSCAASGFTFNKYAMNWVRQAPGKGLEWVARIRSKYNNYATYYADSVKDRFTISRDDSKNTAYLQMNNLKTEDTAVYYCVRHGNFGNSYISYWAYWGQGTLVTVSSGGGGSGGGGSGGGGSQTVVTQEPSLTVSPGGTVTLTCGSSTGAVTSGNYPNWVQQKPGQAPRGLIGGTKFLAPGTPARFSGSLLGGKAALTLSGVQPEDEAEYYCVLWYSNRWVFGGGTKLTVLGGGGDKTHTCPPCPAPELLGGPSVFLFPPKPKDTLMISRTPEVTCVVVDVSHEDPEVKFNWYVDGVEVHNAKTKPCEEQYGSTYRCVSVLTVLHQDWLNGKEYKCKVSNKALPAPIEKTISKAKGQPREPQVYTLPPSREEMTKNQVSLTCLVKGFYPSDIAVEWESNGQPENNYKTTPPVLDSDGSFFLYSKLTVDKSRWQQGNVFSCSVMHEALHNHYTQKSLSLSPGGGGSGGGGSGGGGSGGGGSGGGGSGGGGSDKTHTCPPCPAPELLGGPSVFLFPPKPKDTLMISRTPEVTCVVVDVSHEDPEVKFNWYVDGVEVHNAKTKPCEEQYGSTYRCVSVLTVLHQDWLNGKEYKCKVSNKALPAPIEKTISKAKGQPREPQVYTLPPSREEMTKNQVSLTCLVKGFYPSDIAVEWESNGQPENNYKTTPPVLDSDGSFFLYSKLTVDKSRWQQGNVFSCSVMHEALHNHYTQKSLSLSPGK

SEQ ID NO: 1773 - protein, 984 aa, Artificial Sequence
  Synthetic peptide
EVQLLESGGGLVQPGGSLRLSCAASGFTFSSYAMSWVRQAPGKGLEWVSVISGSGGRPNYAESVKGRFTISRDNSKNTLYLQMNSLRDEDTAVYYCAKVDYSNYLFFDYWGQGTLVTVSSGGGGSGGGGSGGGGSEIVLTQSPGTLSLSPGEGATLSCRAGQSVRSSYLGWYQQKPGQAPRLLIYGASSRATGIPDRFSGSGSGTDFTLTISRLEPEDFAVYYCQQYGYSPPTFGGGTKLEIKSGGGGSEVQLVESGGGLVQPGGSLKLSCAASGFTFNKYAMNWVRQAPGKGLEWVARIRSKYNNYATYYADSVKDRFTISRDDSKNTAYLQMNNLKTEDTAVYYCVRHGNFGNSYISYWAYWGQGTLVTVSSGGGGSGGGGSGGGGSQTVVTQEPSLTVSPGGTVTLTCGSSTGAVTSGNYPNWVQQKPGQAPRGLIGGTKFLAPGTPARFSGSLLGGKAALTLSGVQPEDEAEYYCVLWYSNRWVFGGGTKLTVLGGGGDKTHTCPPCPAPELLGGPSVFLFPPKPKDTLMISRTPEVTCVVVDVSHEDPEVKFNWYVDGVEVHNAKTKPCEEQYGSTYRCVSVLTVLHQDWLNGKEYKCKVSNKALPAPIEKTISKAKGQPREPQVYTLPPSREEMTKNQVSLTCLVKGFYPSDIAVEWESNGQPENNYKTTPPVLDSDGSFFLYSKLTVDKSRWQQGNVFSCSVMHEALHNHYTQKSLSLSPGGGGSGGGGSGGGGSGGGGSGGGGSGGGGSDKTHTCPPCPAPELLGGPSVFLFPPKPKDTLMISRTPEVTCVVVDVSHEDPEVKFNWYVDGVEVHNAKTKPCEEQYGSTYRCVSVLTVLHQDWLNGKEYKCKVSNKALPAPIEKTISKAKGQPREPQVYTLPPSREEMTKNQVSLTCLVKGFYPSDIAVEWESNGQPENNYKTTPPVLDSDGSFFLYSKLTVDKSRWQQGNVFSCSVMHEALHNHYTQKSLSLSPGK

SEQ ID NO: 1774 - protein, 984 aa, Artificial Sequence
  Synthetic peptide
EVQLLESGGGLVQPGGSLKLSCAASGFTFSIYAMSWVRQAPGKCLEWVSAISGSGGSTFYAESVKGRFTISRDNSKNTLYLQMNSLRAEDTAVYYCAKHDYSNYPYFDYWGQGTLVTVSSGGGGSGGGGSGGGGSEIVLTQSPGTLSLSPGERATLSCRASQSVRSSYLAWYQQKPGQAPRLLIYGASSRATGIPDRFSGSGSGTDFTLTISRLEPEDFAVYYCQQYGDLPFTFGCGTKLEIKSGGGGSEVQLVESGGGLVQPGGSLKLSCAASGFTFNKYAMNWVRQAPGKGLEWVARIRSKYNNYATYYADSVKDRFTISRDDSKNTAYLQMNNLKTEDTAVYYCVRHGNFGNSYISYWAYWGQGTLVTVSSGGGGSGGGGSGGGGSQTVVTQEPSLTVSPGGTVTLTCGSSTGAVTSGNYPNWVQQKPGQAPRGLIGGTKFLAPGTPARFSGSLLGGKAALTLSGVQPEDEAEYYCVLWYSNRWVFGGGTKLTVLGGGGDKTHTCPPCPAPELLGGPSVFLFPPKPKDTLMISRTPEVTCVVVDVSHEDPEVKFNWYVDGVEVHNAKTKPCEEQYGSTYRCVSVLTVLHQDWLNGKEYKCKVSNKALPAPIEKTISKAKGQPREPQVYTLPPSREEMTKNQVSLTCLVKGFYPSDIAVEWESNGQPENNYKTTPPVLDSDGSFFLYSKLTVDKSRWQQGNVFSCSVMHEALHNHYTQKSLSLSPGGGGSGGGGSGGGGSGGGGSGGGGSGGGGSDKTHTCPPCPAPELLGGPSVFLFPPKPKDTLMISRTPEVTCVVVDVSHEDPEVKFNWYVDGVEVHNAKTKPCEEQYGSTYRCVSVLTVLHQDWLNGKEYKCKVSNKALPAPIEKTISKAKGQPREPQVYTLPPSREEMTKNQVSLTCLVKGFYPSDIAVEWESNGQPENNYKTTPPVLDSDGSFFLYSKLTVDKSRWQQGNVFSCSVMHEALHNHYTQKSLSLSPGK

SEQ ID NO: 1775 - protein, 984 aa, Artificial Sequence
  Synthetic peptide
EVQLLESGGGLVQPGGSLKLSCAASGFTFSIYAMSWVRQAPGKGLEWVSAISGSGGSTFYAESVKGRFTISRDNSKNTLYLQMNSLRAEDTAVYYCAKHDYSNYPYFDYWGQGTLVTVSSGGGGSGGGGSGGGGSEIVLTQSPGTLSLSPGERATLSCRASQSVRSSYLAWYQQKPGQAPRLLIYGASSRATGIPDRFSGSGSGTDFTLTISRLEPEDFAVYYCQQYGDLPFTFGPGTKLEIKSGGGGSEVQLVESGGGLVQPGGSLKLSCAASGFTFNKYAMNWVRQAPGKGLEWVARIRSKYNNYATYYADSVKDRFTISRDDSKNTAYLQMNNLKTEDTAVYYCVRHGNFGNSYISYWAYWGQGTLVTVSSGGGGSGGGGSGGGGSQTVVTQEPSLTVSPGGTVTLTCGSSTGAVTSGNYPNWVQQKPGQAPRGLIGGTKFLAPGTPARFSGSLLGGKAALTLSGVQPEDEAEYYCVLWYSNRWVFGGGTKLTVLGGGGDKTHTCPPCPAPELLGGPSVFLFPPKPKDTLMISRTPEVTCVVVDVSHEDPEVKFNWYVDGVEVHNAKTKPCEEQYGSTYRCVSVLTVLHQDWLNGKEYKCKVSNKALPAPIEKTISKAKGQPREPQVYTLPPSREEMTKNQVSLTCLVKGFYPSDIAVEWESNGQPENNYKTTPPVLDSDGSFFLYSKLTVDKSRWQQGNVFSCSVMHEALHNHYTQKSLSLSPGGGGSGGGGSGGGGSGGGGSGGGGSGGGGSDKTHTCPPCPAPELLGGPSVFLFPPKPKDTLMISRTPEVTCVVVDVSHEDPEVKFNWYVDGVEVHNAKTKPCEEQYGSTYRCVSVLTVLHQDWLNGKEYKCKVSNKALPAPIEKTISKAKGQPREPQVYTLPPSREEMTKNQVSLTCLVKGFYPSDIAVEWESNGQPENNYKTTPPVLDSDGSFFLYSKLTVDKSRWQQGNVFSCSVMHEALHNHYTQKSLSLSPGK

SEQ ID NO: 1776 - protein, 984 aa, Artificial Sequence
  Synthetic peptide
EVQLLESGGGMVQPGGSLRLSCAASGFTFSSYAMSWVRQAPGKCLEWVSAISGSGGRTFYAESVEGRFTISRDNSKNTLFLQMNSLRAEDTAVYYCAKHDYSNYPYFDYWGQGTLVTVSSGGGGSGGGGSGGGGSEIVLTQSPGTLSLSPGERATLSCRASQSVRSSYLAWYQQKPGQAPRLLIYGASSRATGIPDRFSGSGSGTDFTLTISRLEPEDFAVYYCQQYGSSPFTFGCGTKLEIKSGGGGSEVQLVESGGGLVQPGGSLKLSCAASGFTFNKYAMNWVRQAPGKGLEWVARIRSKYNNYATYYADSVKDRFTISRDDSKNTAYLQMNNLKTEDTAVYYCVRHGNFGNSYISYWAYWGQGTLVTVSSGGGGSGGGGSGGGGSQTVVTQEPSLTVSPGGTVTLTCGSSTGAVTSGNYPNWVQQKPGQAPRGLIGGTKFLAPGTPARFSGSLLGGKAALTLSGVQPEDEAEYYCVLWYSNRWVFGGGTKLTVLGGGGDKTHTCPPCPAPELLGGPSVFLFPPKPKDTLMISRTPEVTCVVVDVSHEDPEVKFNWYVDGVEVHNAKTKPCEEQYGSTYRCVSVLTVLHQDWLNGKEYKCKVSNKALPAPIEKTISKAKGQPREPQVYTLPPSREEMTKNQVSLTCLVKGFYPSDIAVEWESNGQPENNYKTTPPVLDSDGSFFLYSKLTVDKSRWQQGNVFSCSVMHEALHNHYTQKSLSLSPGGGGSGGGGSGGGGSGGGGSGGGGSGGGGSDKTHTCPPCPAPELLGGPSVFLFPPKPKDTLMISRTPEVTCVVVDVSHEDPEVKFNWYVDGVEVHNAKTKPCEEQYGSTYRCVSVLTVLHQDWLNGKEYKCKVSNKALPAPIEKTISKAKGQPREPQVYTLPPSREEMTKNQVSLTCLVKGFYPSDIAVEWESNGQPENNYKTTPPVLDSDGSFFLYSKLTVDKSRWQQGNVFSCSVMHEALHNHYTQKSLSLSPGK

SEQ ID NO: 1777 - protein, 984 aa, Artificial Sequence
  Synthetic peptide
EVQLLESGGGMVQPGGSLRLSCAASGFTFSSYAMSWVRQAPGKGLEWVSAISGSGGRTFYAESVEGRFTISRDNSKNTLFLQMNSLRAEDTAVYYCAKHDYSNYPYFDYWGQGTLVTVSSGGGGSGGGGSGGGGSEIVLTQSPGTLSLSPGERATLSCRASQSVRSSYLAWYQQKPGQAPRLLIYGASSRATGIPDRFSGSGSGTDFTLTISRLEPEDFAVYYCQQYGSSPFTFGPGTKLEIKSGGGGSEVQLVESGGGLVQPGGSLKLSCAASGFTFNKYAMNWVRQAPGKGLEWVARIRSKYNNYATYYADSVKDRFTISRDDSKNTAYLQMNNLKTEDTAVYYCVRHGNFGNSYISYWAYWGQGTLVTVSSGGGGSGGGGSGGGGSQTVVTQEPSLTVSPGGTVTLTCGSSTGAVTSGNYPNWVQQKPGQAPRGLIGGTKFLAPGTPARFSGSLLGGKAALTLSGVQPEDEAEYYCVLWYSNRWVFGGGTKLTVLGGGGDKTHTCPPCPAPELLGGPSVFLFPPKPKDTLMISRTPEVTCVVVDVSHEDPEVKFNWYVDGVEVHNAKTKPCEEQYGSTYRCVSVLTVLHQDWLNGKEYKCKVSNKALPAPIEKTISKAKGQPREPQVYTLPPSREEMTKNQVSLTCLVKGFYPSDIAVEWESNGQPENNYKTTPPVLDSDGSFFLYSKLTVDKSRWQQGNVFSCSVMHEALHNHYTQKSLSLSPGGGGSGGGGSGGGGSGGGGSGGGGSGGGGSDKTHTCPPCPAPELLGGPSVFLFPPKPKDTLMISRTPEVTCVVVDVSHEDPEVKFNWYVDGVEVHNAKTKPCEEQYGSTYRCVSVLTVLHQDWLNGKEYKCKVSNKALPAPIEKTISKAKGQPREPQVYTLPPSREEMTKNQVSLTCLVKGFYPSDIAVEWESNGQPENNYKTTPPVLDSDGSFFLYSKLTVDKSRWQQGNVFSCSVMHEALHNHYTQKSLSLSPGK

SEQ ID NO: 1778 - protein, 984 aa, Artificial Sequence
  Synthetic peptide
EVQLLESGGGMVQPGGSLRLSCAASGFTFSSYAMSWVRQAPGKCLEWVSAISGSGGRTFYAESVEGRFTISRDNSKNTLYLQMNSLRAEDTAVYYCAKHDYSNYPYFDYWGQGTLVTVSSGGGGSGGGGSGGGGSEIVLTQSPGTLSLSPGERATLSCRASQSIRSSYLAWYQQKPGQAPRLLIYGASSRATGIPDRFSGSGSGTDFTLTISRLEPEDFAVYYCQQYGDLPFTFGCGTKLEIKSGGGGSEVQLVESGGGLVQPGGSLKLSCAASGFTFNKYAMNWVRQAPGKGLEWVARIRSKYNNYATYYADSVKDRFTISRDDSKNTAYLQMNNLKTEDTAVYYCVRHGNFGNSYISYWAYWGQGTLVTVSSGGGGSGGGGSGGGGSQTVVTQEPSLTVSPGGTVTLTCGSSTGAVTSGNYPNWVQQKPGQAPRGLIGGTKFLAPGTPARFSGSLLGGKAALTLSGVQPEDEAEYYCVLWYSNRWVFGGGTKLTVLGGGGDKTHTCPPCPAPELLGGPSVFLFPPKPKDTLMISRTPEVTCVVVDVSHEDPEVKFNWYVDGVEVHNAKTKPCEEQYGSTYRCVSVLTVLHQDWLNGKEYKCKVSNKALPAPIEKTISKAKGQPREPQVYTLPPSREEMTKNQVSLTCLVKGFYPSDIAVEWESNGQPENNYKTTPPVLDSDGSFFLYSKLTVDKSRWQQGNVFSCSVMHEALHNHYTQKSLSLSPGGGGSGGGGSGGGGSGGGGSGGGGSGGGGSDKTHTCPPCPAPELLGGPSVFLFPPKPKDTLMISRTPEVTCVVVDVSHEDPEVKFNWYVDGVEVHNAKTKPCEEQYGSTYRCVSVLTVLHQDWLNGKEYKCKVSNKALPAPIEKTISKAKGQPREPQVYTLPPSREEMTKNQVSLTCLVKGFYPSDIAVEWESNGQPENNYKTTPPVLDSDGSFFLYSKLTVDKSRWQQGNVFSCSVMHEALHNHYTQKSLSLSPGK

SEQ ID NO: 1779 - protein, 984 aa, Artificial Sequence
  Synthetic peptide
EVQLLESGGGMVQPGGSLRLSCAASGFTFSSYAMSWVRQAPGKGLEWVSAISGSGGRTFYAESVEGRFTISRDNSKNTLYLQMNSLRAEDTAVYYCAKHDYSNYPYFDYWGQGTLVTVSSGGGGSGGGGSGGGGSEIVLTQSPGTLSLSPGERATLSCRASQSIRSSYLAWYQQKPGQAPRLLIYGASSRATGIPDRFSGSGSGTDFTLTISRLEPEDFAVYYCQQYGDLPFTFGPGTKLEIKSGGGGSEVQLVESGGGLVQPGGSLKLSCAASGFTFNKYAMNWVRQAPGKGLEWVARIRSKYNNYATYYADSVKDRFTISRDDSKNTAYLQMNNLKTEDTAVYYCVRHGNFGNSYISYWAYWGQGTLVTVSSGGGGSGGGGSGGGGSQTVVTQEPSLTVSPGGTVTLTCGSSTGAVTSGNYPNWVQQKPGQAPRGLIGGTKFLAPGTPARFSGSLLGGKAALTLSGVQPEDEAEYYCVLWYSNRWVFGGGTKLTVLGGGGDKTHTCPPCPAPELLGGPSVFLFPPKPKDTLMISRTPEVTCVVVDVSHEDPEVKFNWYVDGVEVHNAKTKPCEEQYGSTYRCVSVLTVLHQDWLNGKEYKCKVSNKALPAPIEKTISKAKGQPREPQVYTLPPSREEMTKNQVSLTCLVKGFYPSDIAVEWESNGQPENNYKTTPPVLDSDGSFFLYSKLTVDKSRWQQGNVFSCSVMHEALHNHYTQKSLSLSPGGGGSGGGGSGGGGSGGGGSGGGGSGGGGSDKTHTCPPCPAPELLGGPSVFLFPPKPKDTLMISRTPEVTCVVVDVSHEDPEVKFNWYVDGVEVHNAKTKPCEEQYGSTYRCVSVLTVLHQDWLNGKEYKCKVSNKALPAPIEKTISKAKGQPREPQVYTLPPSREEMTKNQVSLTCLVKGFYPSDIAVEWESNGQPENNYKTTPPVLDSDGSFFLYSKLTVDKSRWQQGNVFSCSVMHEALHNHYTQKSLSLSPGK

SEQ ID NO: 1780 - protein, 984 aa, Artificial Sequence
  Synthetic peptide
EVQLLESGGGLVQSGGSLRLSCAASGFTFSSYAMSWVRQAPGKCLEWVSAISGSGGRTHYAESVKGRFTISRDNSKNTLYLQMNSLRAEDTAVYYCAKHDYSNYPYFDYWGQGTLVTVSSGGGGSGGGGSGGGGSEIVLTQSPGTLSLSPGERATLSCRASQSVRSSYLAWYQQKPGQAPRLLIYGASSRATGIPDRFSGSGSGTDFTLTISRLEPEDFAVYYCQQYGSSPFTFGCGTKLEIKSGGGGSEVQLVESGGGLVQPGGSLKLSCAASGFTFNKYAMNWVRQAPGKGLEWVARIRSKYNNYATYYADSVKDRFTISRDDSKNTAYLQMNNLKTEDTAVYYCVRHGNFGNSYISYWAYWGQGTLVTVSSGGGGSGGGGSGGGGSQTVVTQEPSLTVSPGGTVTLTCGSSTGAVTSGNYPNWVQQKPGQAPRGLIGGTKFLAPGTPARFSGSLLGGKAALTLSGVQPEDEAEYYCVLWYSNRWVFGGGTKLTVLGGGGDKTHTCPPCPAPELLGGPSVFLFPPKPKDTLMISRTPEVTCVVVDVSHEDPEVKFNWYVDGVEVHNAKTKPCEEQYGSTYRCVSVLTVLHQDWLNGKEYKCKVSNKALPAPIEKTISKAKGQPREPQVYTLPPSREEMTKNQVSLTCLVKGFYPSDIAVEWESNGQPENNYKTTPPVLDSDGSFFLYSKLTVDKSRWQQGNVFSCSVMHEALHNHYTQKSLSLSPGGGGSGGGGSGGGGSGGGGSGGGGSGGGGSDKTHTCPPCPAPELLGGPSVFLFPPKPKDTLMISRTPEVTCVVVDVSHEDPEVKFNWYVDGVEVHNAKTKPCEEQYGSTYRCVSVLTVLHQDWLNGKEYKCKVSNKALPAPIEKTISKAKGQPREPQVYTLPPSREEMTKNQVSLTCLVKGFYPSDIAVEWESNGQPENNYKTTPPVLDSDGSFFLYSKLTVDKSRWQQGNVFSCSVMHEALHNHYTQKSLSLSPGK

SEQ ID NO: 1781 - protein, 984 aa, Artificial Sequence
  Synthetic peptide
EVQLLESGGGLVQSGGSLRLSCAASGFTFSSYAMSWVRQAPGKGLEWVSAISGSGGRTHYAESVKGRFTISRDNSKNTLYLQMNSLRAEDTAVYYCAKHDYSNYPYFDYWGQGTLVTVSSGGGGSGGGGSGGGGSEIVLTQSPGTLSLSPGERATLSCRASQSVRSSYLAWYQQKPGQAPRLLIYGASSRATGIPDRFSGSGSGTDFTLTISRLEPEDFAVYYCQQYGSSPFTFGPGTKLEIKSGGGGSEVQLVESGGGLVQPGGSLKLSCAASGFTFNKYAMNWVRQAPGKGLEWVARIRSKYNNYATYYADSVKDRFTISRDDSKNTAYLQMNNLKTEDTAVYYCVRHGNFGNSYISYWAYWGQGTLVTVSSGGGGSGGGGSGGGGSQTVVTQEPSLTVSPGGTVTLTCGSSTGAVTSGNYPNWVQQKPGQAPRGLIGGTKFLAPGTPARFSGSLLGGKAALTLSGVQPEDEAEYYCVLWYSNRWVFGGGTKLTVLGGGGDKTHTCPPCPAPELLGGPSVFLFPPKPKDTLMISRTPEVTCVVVDVSHEDPEVKFNWYVDGVEVHNAKTKPCEEQYGSTYRCVSVLTVLHQDWLNGKEYKCKVSNKALPAPIEKTISKAKGQPREPQVYTLPPSREEMTKNQVSLTCLVKGFYPSDIAVEWESNGQPENNYKTTPPVLDSDGSFFLYSKLTVDKSRWQQGNVFSCSVMHEALHNHYTQKSLSLSPGGGGSGGGGSGGGGSGGGGSGGGGSGGGGSDKTHTCPPCPAPELLGGPSVFLFPPKPKDTLMISRTPEVTCVVVDVSHEDPEVKFNWYVDGVEVHNAKTKPCEEQYGSTYRCVSVLTVLHQDWLNGKEYKCKVSNKALPAPIEKTISKAKGQPREPQVYTLPPSREEMTKNQVSLTCLVKGFYPSDIAVEWESNGQPENNYKTTPPVLDSDGSFFLYSKLTVDKSRWQQGNVFSCSVMHEALHNHYTQKSLSLSPGK

SEQ ID NO: 1782 - protein, 984 aa, Artificial Sequence
  Synthetic peptide
EVQLLESGGGLVQPGGSLRLSCAASGFTFSSYAMSWVRQAPGKCLEWVSLISGSGGRTHYAESVKGRFTISRDNSKNTLYLQMNSLRAEDTAVYYCAKHDYSNYPYFDYWGQGTLVTVSSGGGGSGGGGSGGGGSEIVLTQSPGTLSLSPGERATLSCRASQSVRSTYLAWYQQKPGQAPRLLIYDASSRATGIPDRFSGSGSGTDFTLTISRLEPEDFAVYFCQQYGSSPPTFGCGTKLEIKSGGGGSEVQLVESGGGLVQPGGSLKLSCAASGFTFNKYAMNWVRQAPGKGLEWVARIRSKYNNYATYYADSVKDRFTISRDDSKNTAYLQMNNLKTEDTAVYYCVRHGNFGNSYISYWAYWGQGTLVTVSSGGGGSGGGGSGGGGSQTVVTQEPSLTVSPGGTVTLTCGSSTGAVTSGNYPNWVQQKPGQAPRGLIGGTKFLAPGTPARFSGSLLGGKAALTLSGVQPEDEAEYYCVLWYSNRWVFGGGTKLTVLGGGGDKTHTCPPCPAPELLGGPSVFLFPPKPKDTLMISRTPEVTCVVVDVSHEDPEVKFNWYVDGVEVHNAKTKPCEEQYGSTYRCVSVLTVLHQDWLNGKEYKCKVSNKALPAPIEKTISKAKGQPREPQVYTLPPSREEMTKNQVSLTCLVKGFYPSDIAVEWESNGQPENNYKTTPPVLDSDGSFFLYSKLTVDKSRWQQGNVFSCSVMHEALHNHYTQKSLSLSPGGGGSGGGGSGGGGSGGGGSGGGGSGGGGSDKTHTCPPCPAPELLGGPSVFLFPPKPKDTLMISRTPEVTCVVVDVSHEDPEVKFNWYVDGVEVHNAKTKPCEEQYGSTYRCVSVLTVLHQDWLNGKEYKCKVSNKALPAPIEKTISKAKGQPREPQVYTLPPSREEMTKNQVSLTCLVKGFYPSDIAVEWESNGQPENNYKTTPPVLDSDGSFFLYSKLTVDKSRWQQGNVFSCSVMHEALHNHYTQKSLSLSPGK

SEQ ID NO: 1783 - protein, 984 aa, Artificial Sequence
  Synthetic peptide
EVQLLESGGGLVQPGGSLRLSCAASGFTFSSYAMSWVRQAPGKGLEWVSLISGSGGRTHYAESVKGRFTISRDNSKNTLYLQMNSLRAEDTAVYYCAKHDYSNYPYFDYWGQGTLVTVSSGGGGSGGGGSGGGGSEIVLTQSPGTLSLSPGERATLSCRASQSVRSTYLAWYQQKPGQAPRLLIYDASSRATGIPDRFSGSGSGTDFTLTISRLEPEDFAVYFCQQYGSSPPTFGGGTKLEIKSGGGGSEVQLVESGGGLVQPGGSLKLSCAASGFTFNKYAMNWVRQAPGKGLEWVARIRSKYNNYATYYADSVKDRFTISRDDSKNTAYLQMNNLKTEDTAVYYCVRHGNFGNSYISYWAYWGQGTLVTVSSGGGGSGGGGSGGGGSQTVVTQEPSLTVSPGGTVTLTCGSSTGAVTSGNYPNWVQQKPGQAPRGLIGGTKFLAPGTPARFSGSLLGGKAALTLSGVQPEDEAEYYCVLWYSNRWVFGGGTKLTVLGGGGDKTHTCPPCPAPELLGGPSVFLFPPKPKDTLMISRTPEVTCVVVDVSHEDPEVKFNWYVDGVEVHNAKTKPCEEQYGSTYRCVSVLTVLHQDWLNGKEYKCKVSNKALPAPIEKTISKAKGQPREPQVYTLPPSREEMTKNQVSLTCLVKGFYPSDIAVEWESNGQPENNYKTTPPVLDSDGSFFLYSKLTVDKSRWQQGNVFSCSVMHEALHNHYTQKSLSLSPGGGGSGGGGSGGGGSGGGGSGGGGSGGGGSDKTHTCPPCPAPELLGGPSVFLFPPKPKDTLMISRTPEVTCVVVDVSHEDPEVKFNWYVDGVEVHNAKTKPCEEQYGSTYRCVSVLTVLHQDWLNGKEYKCKVSNKALPAPIEKTISKAKGQPREPQVYTLPPSREEMTKNQVSLTCLVKGFYPSDIAVEWESNGQPENNYKTTPPVLDSDGSFFLYSKLTVDKSRWQQGNVFSCSVMHEALHNHYTQKSLSLSPGK

SEQ ID NO: 1784 - protein, 984 aa, Artificial Sequence
  Synthetic peptide
EVQLLESGGGLVQPGGSLRLSCAASGFTFSTYAMSWVRQAPGKCLEWVSAISGSGGSTFYAESVKGRFTISRDNSKNTLSLQMNSLRAEDTAVYYCAKHDYSNYPYFDYWGQGTLVTVSSGGGGSGGGGSGGGGSEIVLTQSPGTLSLSPGERATLSCRASQSVRSSYLAWYQQKPGQAPRLLIYGASSRATGIPDRFSGSGSGTDFTLTISRLEPEDFAVYYCQQYGDLPFTFGCGTKLEIKSGGGGSEVQLVESGGGLVQPGGSLKLSCAASGFTFNKYAMNWVRQAPGKGLEWVARIRSKYNNYATYYADSVKDRFTISRDDSKNTAYLQMNNLKTEDTAVYYCVRHGNFGNSYISYWAYWGQGTLVTVSSGGGGSGGGGSGGGGSQTVVTQEPSLTVSPGGTVTLTCGSSTGAVTSGNYPNWVQQKPGQAPRGLIGGTKFLAPGTPARFSGSLLGGKAALTLSGVQPEDEAEYYCVLWYSNRWVFGGGTKLTVLGGGGDKTHTCPPCPAPELLGGPSVFLFPPKPKDTLMISRTPEVTCVVVDVSHEDPEVKFNWYVDGVEVHNAKTKPCEEQYGSTYRCVSVLTVLHQDWLNGKEYKCKVSNKALPAPIEKTISKAKGQPREPQVYTLPPSREEMTKNQVSLTCLVKGFYPSDIAVEWESNGQPENNYKTTPPVLDSDGSFFLYSKLTVDKSRWQQGNVFSCSVMHEALHNHYTQKSLSLSPGGGGSGGGGSGGGGSGGGGSGGGGSGGGGSDKTHTCPPCPAPELLGGPSVFLFPPKPKDTLMISRTPEVTCVVVDVSHEDPEVKFNWYVDGVEVHNAKTKPCEEQYGSTYRCVSVLTVLHQDWLNGKEYKCKVSNKALPAPIEKTISKAKGQPREPQVYTLPPSREEMTKNQVSLTCLVKGFYPSDIAVEWESNGQPENNYKTTPPVLDSDGSFFLYSKLTVDKSRWQQGNVFSCSVMHEALHNHYTQKSLSLSPGK

SEQ ID NO: 1785 - protein, 984 aa, Artificial Sequence
  Synthetic peptide
EVQLLESGGGLVQPGGSLRLSCAASGFTFSTYAMSWVRQAPGKGLEWVSAISGSGGSTFYAESVKGRFTISRDNSKNTLSLQMNSLRAEDTAVYYCAKHDYSNYPYFDYWGQGTLVTVSSGGGGSGGGGSGGGGSEIVLTQSPGTLSLSPGERATLSCRASQSVRSSYLAWYQQKPGQAPRLLIYGASSRATGIPDRFSGSGSGTDFTLTISRLEPEDFAVYYCQQYGDLPFTFGPGTKLEIKSGGGGSEVQLVESGGGLVQPGGSLKLSCAASGFTFNKYAMNWVRQAPGKGLEWVARIRSKYNNYATYYADSVKDRFTISRDDSKNTAYLQMNNLKTEDTAVYYCVRHGNFGNSYISYWAYWGQGTLVTVSSGGGGSGGGGSGGGGSQTVVTQEPSLTVSPGGTVTLTCGSSTGAVTSGNYPNWVQQKPGQAPRGLIGGTKFLAPGTPARFSGSLLGGKAALTLSGVQPEDEAEYYCVLWYSNRWVFGGGTKLTVLGGGGDKTHTCPPCPAPELLGGPSVFLFPPKPKDTLMISRTPEVTCVVVDVSHEDPEVKFNWYVDGVEVHNAKTKPCEEQYGSTYRCVSVLTVLHQDWLNGKEYKCKVSNKALPAPIEKTISKAKGQPREPQVYTLPPSREEMTKNQVSLTCLVKGFYPSDIAVEWESNGQPENNYKTTPPVLDSDGSFFLYSKLTVDKSRWQQGNVFSCSVMHEALHNHYTQKSLSLSPGGGGSGGGGSGGGGSGGGGSGGGGSGGGGSDKTHTCPPCPAPELLGGPSVFLFPPKPKDTLMISRTPEVTCVVVDVSHEDPEVKFNWYVDGVEVHNAKTKPCEEQYGSTYRCVSVLTVLHQDWLNGKEYKCKVSNKALPAPIEKTISKAKGQPREPQVYTLPPSREEMTKNQVSLTCLVKGFYPSDIAVEWESNGQPENNYKTTPPVLDSDGSFFLYSKLTVDKSRWQQGNVFSCSVMHEALHNHYTQKSLSLSPGK

SEQ ID NO: 1786 - protein, 984 aa, Artificial Sequence
  Synthetic peptide
EVQLLESGGGMVQPGGSLRLSCAASGFTFSTYAMSWVRQAPGKCLEWVSAISGSGGRTFYAESVEGRFTISRDNSKNTLYLQMNSLRAEDTAVYYCAKHDYSNYPYFDYWGQGTLVTVSSGGGGSGGGGSGGGGSEIVLTQSPGTLSLSPGERATLSCRASQSVRSTYLAWYQQKPGQAPRLLIYGASSRATGIPDRFSGSGSGTDFTLTISRLEPEDFAVYSCQQYGDLPFTFGCGTKLEIKSGGGGSEVQLVESGGGLVQPGGSLKLSCAASGFTFNKYAMNWVRQAPGKGLEWVARIRSKYNNYATYYADSVKDRFTISRDDSKNTAYLQMNNLKTEDTAVYYCVRHGNFGNSYISYWAYWGQGTLVTVSSGGGGSGGGGSGGGGSQTVVTQEPSLTVSPGGTVTLTCGSSTGAVTSGNYPNWVQQKPGQAPRGLIGGTKFLAPGTPARFSGSLLGGKAALTLSGVQPEDEAEYYCVLWYSNRWVFGGGTKLTVLGGGGDKTHTCPPCPAPELLGGPSVFLFPPKPKDTLMISRTPEVTCVVVDVSHEDPEVKFNWYVDGVEVHNAKTKPCEEQYGSTYRCVSVLTVLHQDWLNGKEYKCKVSNKALPAPIEKTISKAKGQPREPQVYTLPPSREEMTKNQVSLTCLVKGFYPSDIAVEWESNGQPENNYKTTPPVLDSDGSFFLYSKLTVDKSRWQQGNVFSCSVMHEALHNHYTQKSLSLSPGGGGSGGGGSGGGGSGGGGSGGGGSGGGGSDKTHTCPPCPAPELLGGPSVFLFPPKPKDTLMISRTPEVTCVVVDVSHEDPEVKFNWYVDGVEVHNAKTKPCEEQYGSTYRCVSVLTVLHQDWLNGKEYKCKVSNKALPAPIEKTISKAKGQPREPQVYTLPPSREEMTKNQVSLTCLVKGFYPSDIAVEWESNGQPENNYKTTPPVLDSDGSFFLYSKLTVDKSRWQQGNVFSCSVMHEALHNHYTQKSLSLSPGK

SEQ ID NO: 1787 - protein, 984 aa, Artificial Sequence
  Synthetic peptide
EVQLLESGGGMVQPGGSLRLSCAASGFTFSTYAMSWVRQAPGKGLEWVSAISGSGGRTFYAESVEGRFTISRDNSKNTLYLQMNSLRAEDTAVYYCAKHDYSNYPYFDYWGQGTLVTVSSGGGGSGGGGSGGGGSEIVLTQSPGTLSLSPGERATLSCRASQSVRSTYLAWYQQKPGQAPRLLIYGASSRATGIPDRFSGSGSGTDFTLTISRLEPEDFAVYSCQQYGDLPFTFGPGTKLEIKSGGGGSEVQLVESGGGLVQPGGSLKLSCAASGFTFNKYAMNWVRQAPGKGLEWVARIRSKYNNYATYYADSVKDRFTISRDDSKNTAYLQMNNLKTEDTAVYYCVRHGNFGNSYISYWAYWGQGTLVTVSSGGGGSGGGGSGGGGSQTVVTQEPSLTVSPGGTVTLTCGSSTGAVTSGNYPNWVQQKPGQAPRGLIGGTKFLAPGTPARFSGSLLGGKAALTLSGVQPEDEAEYYCVLWYSNRWVFGGGTKLTVLGGGGDKTHTCPPCPAPELLGGPSVFLFPPKPKDTLMISRTPEVTCVVVDVSHEDPEVKFNWYVDGVEVHNAKTKPCEEQYGSTYRCVSVLTVLHQDWLNGKEYKCKVSNKALPAPIEKTISKAKGQPREPQVYTLPPSREEMTKNQVSLTCLVKGFYPSDIAVEWESNGQPENNYKTTPPVLDSDGSFFLYSKLTVDKSRWQQGNVFSCSVMHEALHNHYTQKSLSLSPGGGGSGGGGSGGGGSGGGGSGGGGSGGGGSDKTHTCPPCPAPELLGGPSVFLFPPKPKDTLMISRTPEVTCVVVDVSHEDPEVKFNWYVDGVEVHNAKTKPCEEQYGSTYRCVSVLTVLHQDWLNGKEYKCKVSNKALPAPIEKTISKAKGQPREPQVYTLPPSREEMTKNQVSLTCLVKGFYPSDIAVEWESNGQPENNYKTTPPVLDSDGSFFLYSKLTVDKSRWQQGNVFSCSVMHEALHNHYTQKSLSLSPGK

SEQ ID NO: 1788 - protein, 984 aa, Artificial Sequence
  Synthetic peptide
EVQLLESGGGLVQPGGSLRLSCAASGFTFSSYAMSWVRQAPGKCLEWVSAISGSGGYTYYAESVKGRFTISRDNSKNTLYLQMNSLRAEDTAVYYCAKHDYSNYPYFDYWGQGTLVTVSSGGGGSGGGGSGGGGSEIVLTQSPGTLSLSPGERATLSCRASQSVRSNYLAWYQQKPGQAPRLLIYGASSRATGIPDRFSGSGSGTDFTLTISRLEPEDFAVYYCQQYGDLPFTFGCGTKVEIKSGGGGSEVQLVESGGGLVQPGGSLKLSCAASGFTFNKYAMNWVRQAPGKGLEWVARIRSKYNNYATYYADSVKDRFTISRDDSKNTAYLQMNNLKTEDTAVYYCVRHGNFGNSYISYWAYWGQGTLVTVSSGGGGSGGGGSGGGGSQTVVTQEPSLTVSPGGTVTLTCGSSTGAVTSGNYPNWVQQKPGQAPRGLIGGTKFLAPGTPARFSGSLLGGKAALTLSGVQPEDEAEYYCVLWYSNRWVFGGGTKLTVLGGGGDKTHTCPPCPAPELLGGPSVFLFPPKPKDTLMISRTPEVTCVVVDVSHEDPEVKFNWYVDGVEVHNAKTKPCEEQYGSTYRCVSVLTVLHQDWLNGKEYKCKVSNKALPAPIEKTISKAKGQPREPQVYTLPPSREEMTKNQVSLTCLVKGFYPSDIAVEWESNGQPENNYKTTPPVLDSDGSFFLYSKLTVDKSRWQQGNVFSCSVMHEALHNHYTQKSLSLSPGGGGSGGGGSGGGGSGGGGSGGGGSGGGGSDKTHTCPPCPAPELLGGPSVFLFPPKPKDTLMISRTPEVTCVVVDVSHEDPEVKFNWYVDGVEVHNAKTKPCEEQYGSTYRCVSVLTVLHQDWLNGKEYKCKVSNKALPAPIEKTISKAKGQPREPQVYTLPPSREEMTKNQVSLTCLVKGFYPSDIAVEWESNGQPENNYKTTPPVLDSDGSFFLYSKLTVDKSRWQQGNVFSCSVMHEALHNHYTQKSLSLSPGK

SEQ ID NO: 1789 - protein, 984 aa, Artificial Sequence
  Synthetic peptide
EVQLLESGGGLVQPGGSLRLSCAASGFTFSSYAMSWVRQAPGKGLEWVSAISGSGGYTYYAESVKGRFTISRDNSKNTLYLQMNSLRAEDTAVYYCAKHDYSNYPYFDYWGQGTLVTVSSGGGGSGGGGSGGGGSEIVLTQSPGTLSLSPGERATLSCRASQSVRSNYLAWYQQKPGQAPRLLIYGASSRATGIPDRFSGSGSGTDFTLTISRLEPEDFAVYYCQQYGDLPFTFGPGTKVEIKSGGGGSEVQLVESGGGLVQPGGSLKLSCAASGFTFNKYAMNWVRQAPGKGLEWVARIRSKYNNYATYYADSVKDRFTISRDDSKNTAYLQMNNLKTEDTAVYYCVRHGNFGNSYISYWAYWGQGTLVTVSSGGGGSGGGGSGGGGSQTVVTQEPSLTVSPGGTVTLTCGSSTGAVTSGNYPNWVQQKPGQAPRGLIGGTKFLAPGTPARFSGSLLGGKAALTLSGVQPEDEAEYYCVLWYSNRWVFGGGTKLTVLGGGGDKTHTCPPCPAPELLGGPSVFLFPPKPKDTLMISRTPEVTCVVVDVSHEDPEVKFNWYVDGVEVHNAKTKPCEEQYGSTYRCVSVLTVLHQDWLNGKEYKCKVSNKALPAPIEKTISKAKGQPREPQVYTLPPSREEMTKNQVSLTCLVKGFYPSDIAVEWESNGQPENNYKTTPPVLDSDGSFFLYSKLTVDKSRWQQGNVFSCSVMHEALHNHYTQKSLSLSPGGGGSGGGGSGGGGSGGGGSGGGGSGGGGSDKTHTCPPCPAPELLGGPSVFLFPPKPKDTLMISRTPEVTCVVVDVSHEDPEVKFNWYVDGVEVHNAKTKPCEEQYGSTYRCVSVLTVLHQDWLNGKEYKCKVSNKALPAPIEKTISKAKGQPREPQVYTLPPSREEMTKNQVSLTCLVKGFYPSDIAVEWESNGQPENNYKTTPPVLDSDGSFFLYSKLTVDKSRWQQGNVFSCSVMHEALHNHYTQKSLSLSPGK

SEQ ID NO: 1790 - protein, 984 aa, Artificial Sequence
  Synthetic peptide
EVQLLESGGGLAQPGGSLRLSCAASGFTFSSYAMSWVRQAPGKCLEWVSAISGSGGSTFYAESVKGRFTISRDNSKNTLYLQMNSLRAEDTAVYFCAKHDYSNYPYFDYWGQGTLVTVSSGGGGSGGGGSGGGGSEIVLTQSPGTLSLSPGERATLSCRASQSVRSSYLAWYQQKPGQAPRLLIYGASSRATGIPDRFSGSGSGTDFTLTISRLEPEDFAVYYCQQYGDLPFTFGCGTKVEIKSGGGGSEVQLVESGGGLVQPGGSLKLSCAASGFTFNKYAMNWVRQAPGKGLEWVARIRSKYNNYATYYADSVKDRFTISRDDSKNTAYLQMNNLKTEDTAVYYCVRHGNFGNSYISYWAYWGQGTLVTVSSGGGGSGGGGSGGGGSQTVVTQEPSLTVSPGGTVTLTCGSSTGAVTSGNYPNWVQQKPGQAPRGLIGGTKFLAPGTPARFSGSLLGGKAALTLSGVQPEDEAEYYCVLWYSNRWVFGGGTKLTVLGGGGDKTHTCPPCPAPELLGGPSVFLFPPKPKDTLMISRTPEVTCVVVDVSHEDPEVKFNWYVDGVEVHNAKTKPCEEQYGSTYRCVSVLTVLHQDWLNGKEYKCKVSNKALPAPIEKTISKAKGQPREPQVYTLPPSREEMTKNQVSLTCLVKGFYPSDIAVEWESNGQPENNYKTTPPVLDSDGSFFLYSKLTVDKSRWQQGNVFSCSVMHEALHNHYTQKSLSLSPGGGGSGGGGSGGGGSGGGGSGGGGSGGGGSDKTHTCPPCPAPELLGGPSVFLFPPKPKDTLMISRTPEVTCVVVDVSHEDPEVKFNWYVDGVEVHNAKTKPCEEQYGSTYRCVSVLTVLHQDWLNGKEYKCKVSNKALPAPIEKTISKAKGQPREPQVYTLPPSREEMTKNQVSLTCLVKGFYPSDIAVEWESNGQPENNYKTTPPVLDSDGSFFLYSKLTVDKSRWQQGNVFSCSVMHEALHNHYTQKSLSLSPGK

SEQ ID NO: 1791 - protein, 984 aa, Artificial Sequence
  Synthetic peptide
EVQLLESGGGLAQPGGSLRLSCAASGFTFSSYAMSWVRQAPGKGLEWVSAISGSGGSTFYAESVKGRFTISRDNSKNTLYLQMNSLRAEDTAVYFCAKHDYSNYPYFDYWGQGTLVTVSSGGGGSGGGGSGGGGSEIVLTQSPGTLSLSPGERATLSCRASQSVRSSYLAWYQQKPGQAPRLLIYGASSRATGIPDRFSGSGSGTDFTLTISRLEPEDFAVYYCQQYGDLPFTFGPGTKVEIKSGGGGSEVQLVESGGGLVQPGGSLKLSCAASGFTFNKYAMNWVRQAPGKGLEWVARIRSKYNNYATYYADSVKDRFTISRDDSKNTAYLQMNNLKTEDTAVYYCVRHGNFGNSYISYWAYWGQGTLVTVSSGGGGSGGGGSGGGGSQTVVTQEPSLTVSPGGTVTLTCGSSTGAVTSGNYPNWVQQKPGQAPRGLIGGTKFLAPGTPARFSGSLLGGKAALTLSGVQPEDEAEYYCVLWYSNRWVFGGGTKLTVLGGGGDKTHTCPPCPAPELLGGPSVFLFPPKPKDTLMISRTPEVTCVVVDVSHEDPEVKFNWYVDGVEVHNAKTKPCEEQYGSTYRCVSVLTVLHQDWLNGKEYKCKVSNKALPAPIEKTISKAKGQPREPQVYTLPPSREEMTKNQVSLTCLVKGFYPSDIAVEWESNGQPENNYKTTPPVLDSDGSFFLYSKLTVDKSRWQQGNVFSCSVMHEALHNHYTQKSLSLSPGGGGSGGGGSGGGGSGGGGSGGGGSGGGGSDKTHTCPPCPAPELLGGPSVFLFPPKPKDTLMISRTPEVTCVVVDVSHEDPEVKFNWYVDGVEVHNAKTKPCEEQYGSTYRCVSVLTVLHQDWLNGKEYKCKVSNKALPAPIEKTISKAKGQPREPQVYTLPPSREEMTKNQVSLTCLVKGFYPSDIAVEWESNGQPENNYKTTPPVLDSDGSFFLYSKLTVDKSRWQQGNVFSCSVMHEALHNHYTQKSLSLSPGK

SEQ ID NO: 1792 - protein, 984 aa, Artificial Sequence
  Synthetic peptide
EVQLLESGGGMVQPGGSLRLSCAASGFTFSSYAMSWVRQAPGKCLEWVSAISGSGGRTFYAESVEGRFTISRDNSKNTLYLQMNSLRAEDTAVYYCAKHDYSNYPYFDYWGQGTLVTVSSGGGGSGGGGSGGGGSEIVLTQSPGTLSLSPGERATLSCRASQSVRSNYLAWYQQKPGQAPRLLIYGASSRATGIPDRFSGSGSGTDFTLTISRLEPEDFAVYYCQQYGDLPFTFGCGTKVEIKSGGGGSEVQLVESGGGLVQPGGSLKLSCAASGFTFNKYAMNWVRQAPGKGLEWVARIRSKYNNYATYYADSVKDRFTISRDDSKNTAYLQMNNLKTEDTAVYYCVRHGNFGNSYISYWAYWGQGTLVTVSSGGGGSGGGGSGGGGSQTVVTQEPSLTVSPGGTVTLTCGSSTGAVTSGNYPNWVQQKPGQAPRGLIGGTKFLAPGTPARFSGSLLGGKAALTLSGVQPEDEAEYYCVLWYSNRWVFGGGTKLTVLGGGGDKTHTCPPCPAPELLGGPSVFLFPPKPKDTLMISRTPEVTCVVVDVSHEDPEVKFNWYVDGVEVHNAKTKPCEEQYGSTYRCVSVLTVLHQDWLNGKEYKCKVSNKALPAPIEKTISKAKGQPREPQVYTLPPSREEMTKNQVSLTCLVKGFYPSDIAVEWESNGQPENNYKTTPPVLDSDGSFFLYSKLTVDKSRWQQGNVFSCSVMHEALHNHYTQKSLSLSPGGGGSGGGGSGGGGSGGGGSGGGGSGGGGSDKTHTCPPCPAPELLGGPSVFLFPPKPKDTLMISRTPEVTCVVVDVSHEDPEVKFNWYVDGVEVHNAKTKPCEEQYGSTYRCVSVLTVLHQDWLNGKEYKCKVSNKALPAPIEKTISKAKGQPREPQVYTLPPSREEMTKNQVSLTCLVKGFYPSDIAVEWESNGQPENNYKTTPPVLDSDGSFFLYSKLTVDKSRWQQGNVFSCSVMHEALHNHYTQKSLSLSPGK

SEQ ID NO: 1793 - protein, 984 aa, Artificial Sequence
  Synthetic peptide
EVQLLESGGGMVQPGGSLRLSCAASGFTFSSYAMSWVRQAPGKGLEWVSAISGSGGRTFYAESVEGRFTISRDNSKNTLYLQMNSLRAEDTAVYYCAKHDYSNYPYFDYWGQGTLVTVSSGGGGSGGGGSGGGGSEIVLTQSPGTLSLSPGERATLSCRASQSVRSNYLAWYQQKPGQAPRLLIYGASSRATGIPDRFSGSGSGTDFTLTISRLEPEDFAVYYCQQYGDLPFTFGPGTKVEIKSGGGGSEVQLVESGGGLVQPGGSLKLSCAASGFTFNKYAMNWVRQAPGKGLEWVARIRSKYNNYATYYADSVKDRFTISRDDSKNTAYLQMNNLKTEDTAVYYCVRHGNFGNSYISYWAYWGQGTLVTVSSGGGGSGGGGSGGGGSQTVVTQEPSLTVSPGGTVTLTCGSSTGAVTSGNYPNWVQQKPGQAPRGLIGGTKFLAPGTPARFSGSLLGGKAALTLSGVQPEDEAEYYCVLWYSNRWVFGGGTKLTVLGGGGDKTHTCPPCPAPELLGGPSVFLFPPKPKDTLMISRTPEVTCVVVDVSHEDPEVKFNWYVDGVEVHNAKTKPCEEQYGSTYRCVSVLTVLHQDWLNGKEYKCKVSNKALPAPIEKTISKAKGQPREPQVYTLPPSREEMTKNQVSLTCLVKGFYPSDIAVEWESNGQPENNYKTTPPVLDSDGSFFLYSKLTVDKSRWQQGNVFSCSVMHEALHNHYTQKSLSLSPGGGGSGGGGSGGGGSGGGGSGGGGSGGGGSDKTHTCPPCPAPELLGGPSVFLFPPKPKDTLMISRTPEVTCVVVDVSHEDPEVKFNWYVDGVEVHNAKTKPCEEQYGSTYRCVSVLTVLHQDWLNGKEYKCKVSNKALPAPIEKTISKAKGQPREPQVYTLPPSREEMTKNQVSLTCLVKGFYPSDIAVEWESNGQPENNYKTTPPVLDSDGSFFLYSKLTVDKSRWQQGNVFSCSVMHEALHNHYTQKSLSLSPGK

SEQ ID NO: 1794 - protein, 984 aa, Artificial Sequence
  Synthetic peptide
EVQLLESGGGMVQPGGSLRLSCAASGFTFSSYAMSWVRQAPGKCLEWVSAISGSGGRTFYAESVEGRFTISRDNSKNTLYLQMNSLRAEDTAVYYCAKHDYSNYPYFDYWGQGTLVTVSSGGGGSGGGGSGGGGSEIVLTQSPGTLSLSPGERATLSCRASQSVRSSYLAWYQQKPGQAPRLLIYGASSRATGIPDRFSGSGSGTDFTLTISRLEPEDFAVYYCQQYGSSPFTFGCGTKVEIKSGGGGSEVQLVESGGGLVQPGGSLKLSCAASGFTFNKYAMNWVRQAPGKGLEWVARIRSKYNNYATYYADSVKDRFTISRDDSKNTAYLQMNNLKTEDTAVYYCVRHGNFGNSYISYWAYWGQGTLVTVSSGGGGSGGGGSGGGGSQTVVTQEPSLTVSPGGTVTLTCGSSTGAVTSGNYPNWVQQKPGQAPRGLIGGTKFLAPGTPARFSGSLLGGKAALTLSGVQPEDEAEYYCVLWYSNRWVFGGGTKLTVLGGGGDKTHTCPPCPAPELLGGPSVFLFPPKPKDTLMISRTPEVTCVVVDVSHEDPEVKFNWYVDGVEVHNAKTKPCEEQYGSTYRCVSVLTVLHQDWLNGKEYKCKVSNKALPAPIEKTISKAKGQPREPQVYTLPPSREEMTKNQVSLTCLVKGFYPSDIAVEWESNGQPENNYKTTPPVLDSDGSFFLYSKLTVDKSRWQQGNVFSCSVMHEALHNHYTQKSLSLSPGGGGSGGGGSGGGGSGGGGSGGGGSGGGGSDKTHTCPPCPAPELLGGPSVFLFPPKPKDTLMISRTPEVTCVVVDVSHEDPEVKFNWYVDGVEVHNAKTKPCEEQYGSTYRCVSVLTVLHQDWLNGKEYKCKVSNKALPAPIEKTISKAKGQPREPQVYTLPPSREEMTKNQVSLTCLVKGFYPSDIAVEWESNGQPENNYKTTPPVLDSDGSFFLYSKLTVDKSRWQQGNVFSCSVMHEALHNHYTQKSLSLSPGK

SEQ ID NO: 1795 - protein, 984 aa, Artificial Sequence
  Synthetic peptide
EVQLLESGGGMVQPGGSLRLSCAASGFTFSSYAMSWVRQAPGKGLEWVSAISGSGGRTFYAESVEGRFTISRDNSKNTLYLQMNSLRAEDTAVYYCAKHDYSNYPYFDYWGQGTLVTVSSGGGGSGGGGSGGGGSEIVLTQSPGTLSLSPGERATLSCRASQSVRSSYLAWYQQKPGQAPRLLIYGASSRATGIPDRFSGSGSGTDFTLTISRLEPEDFAVYYCQQYGSSPFTFGPGTKVEIKSGGGGSEVQLVESGGGLVQPGGSLKLSCAASGFTFNKYAMNWVRQAPGKGLEWVARIRSKYNNYATYYADSVKDRFTISRDDSKNTAYLQMNNLKTEDTAVYYCVRHGNFGNSYISYWAYWGQGTLVTVSSGGGGSGGGGSGGGGSQTVVTQEPSLTVSPGGTVTLTCGSSTGAVTSGNYPNWVQQKPGQAPRGLIGGTKFLAPGTPARFSGSLLGGKAALTLSGVQPEDEAEYYCVLWYSNRWVFGGGTKLTVLGGGGDKTHTCPPCPAPELLGGPSVFLFPPKPKDTLMISRTPEVTCVVVDVSHEDPEVKFNWYVDGVEVHNAKTKPCEEQYGSTYRCVSVLTVLHQDWLNGKEYKCKVSNKALPAPIEKTISKAKGQPREPQVYTLPPSREEMTKNQVSLTCLVKGFYPSDIAVEWESNGQPENNYKTTPPVLDSDGSFFLYSKLTVDKSRWQQGNVFSCSVMHEALHNHYTQKSLSLSPGGGGSGGGGSGGGGSGGGGSGGGGSGGGGSDKTHTCPPCPAPELLGGPSVFLFPPKPKDTLMISRTPEVTCVVVDVSHEDPEVKFNWYVDGVEVHNAKTKPCEEQYGSTYRCVSVLTVLHQDWLNGKEYKCKVSNKALPAPIEKTISKAKGQPREPQVYTLPPSREEMTKNQVSLTCLVKGFYPSDIAVEWESNGQPENNYKTTPPVLDSDGSFFLYSKLTVDKSRWQQGNVFSCSVMHEALHNHYTQKSLSLSPGK

SEQ ID NO: 1796 - protein, 984 aa, Artificial Sequence
  Synthetic peptide
EVQLLESGGGLVQPGGSLRLSCAASGFTFSSYAMSWVRQAPGKCLEWVSAISGSGGSTFYAESVQGRFTISRDNSKNTLYLQVNSLRAEDTAVYYCARHDYSNYPYFDYWGQGTLVTVSSGGGGSGGGGSGGGGSEIVLTQSPGTLSLSPGERATLSCRASQSVRGNYLAWYQQKPGQAPRLLIYGASSRATGIPDRFSGSGSGTDFTLTISRLEPEDFAVYYCQQYGYSPFTFGCGTKVEIKSGGGGSEVQLVESGGGLVQPGGSLKLSCAASGFTFNKYAMNWVRQAPGKGLEWVARIRSKYNNYATYYADSVKDRFTISRDDSKNTAYLQMNNLKTEDTAVYYCVRHGNFGNSYISYWAYWGQGTLVTVSSGGGGSGGGGSGGGGSQTVVTQEPSLTVSPGGTVTLTCGSSTGAVTSGNYPNWVQQKPGQAPRGLIGGTKFLAPGTPARFSGSLLGGKAALTLSGVQPEDEAEYYCVLWYSNRWVFGGGTKLTVLGGGGDKTHTCPPCPAPELLGGPSVFLFPPKPKDTLMISRTPEVTCVVVDVSHEDPEVKFNWYVDGVEVHNAKTKPCEEQYGSTYRCVSVLTVLHQDWLNGKEYKCKVSNKALPAPIEKTISKAKGQPREPQVYTLPPSREEMTKNQVSLTCLVKGFYPSDIAVEWESNGQPENNYKTTPPVLDSDGSFFLYSKLTVDKSRWQQGNVFSCSVMHEALHNHYTQKSLSLSPGGGGSGGGGSGGGGSGGGGSGGGGSGGGGSDKTHTCPPCPAPELLGGPSVFLFPPKPKDTLMISRTPEVTCVVVDVSHEDPEVKFNWYVDGVEVHNAKTKPCEEQYGSTYRCVSVLTVLHQDWLNGKEYKCKVSNKALPAPIEKTISKAKGQPREPQVYTLPPSREEMTKNQVSLTCLVKGFYPSDIAVEWESNGQPENNYKTTPPVLDSDGSFFLYSKLTVDKSRWQQGNVFSCSVMHEALHNHYTQKSLSLSPGK

SEQ ID NO: 1797 - protein, 984 aa, Artificial Sequence
  Synthetic peptide
EVQLLESGGGLVQPGGSLRLSCAASGFTFSSYAMSWVRQAPGKGLEWVSAISGSGGSTFYAESVQGRFTISRDNSKNTLYLQVNSLRAEDTAVYYCARHDYSNYPYFDYWGQGTLVTVSSGGGGSGGGGSGGGGSEIVLTQSPGTLSLSPGERATLSCRASQSVRGNYLAWYQQKPGQAPRLLIYGASSRATGIPDRFSGSGSGTDFTLTISRLEPEDFAVYYCQQYGYSPFTFGPGTKVEIKSGGGGSEVQLVESGGGLVQPGGSLKLSCAASGFTFNKYAMNWVRQAPGKGLEWVARIRSKYNNYATYYADSVKDRFTISRDDSKNTAYLQMNNLKTEDTAVYYCVRHGNFGNSYISYWAYWGQGTLVTVSSGGGGSGGGGSGGGGSQTVVTQEPSLTVSPGGTVTLTCGSSTGAVTSGNYPNWVQQKPGQAPRGLIGGTKFLAPGTPARFSGSLLGGKAALTLSGVQPEDEAEYYCVLWYSNRWVFGGGTKLTVLGGGGDKTHTCPPCPAPELLGGPSVFLFPPKPKDTLMISRTPEVTCVVVDVSHEDPEVKFNWYVDGVEVHNAKTKPCEEQYGSTYRCVSVLTVLHQDWLNGKEYKCKVSNKALPAPIEKTISKAKGQPREPQVYTLPPSREEMTKNQVSLTCLVKGFYPSDIAVEWESNGQPENNYKTTPPVLDSDGSFFLYSKLTVDKSRWQQGNVFSCSVMHEALHNHYTQKSLSLSPGGGGSGGGGSGGGGSGGGGSGGGGSGGGGSDKTHTCPPCPAPELLGGPSVFLFPPKPKDTLMISRTPEVTCVVVDVSHEDPEVKFNWYVDGVEVHNAKTKPCEEQYGSTYRCVSVLTVLHQDWLNGKEYKCKVSNKALPAPIEKTISKAKGQPREPQVYTLPPSREEMTKNQVSLTCLVKGFYPSDIAVEWESNGQPENNYKTTPPVLDSDGSFFLYSKLTVDKSRWQQGNVFSCSVMHEALHNHYTQKSLSLSPGK

SEQ ID NO: 1798 - protein, 984 aa, Artificial Sequence
  Synthetic peptide
EVQLLESGGGLVQPGGSLRLSCAASGFTFSTYAMSWVRQAPGKCLEWVSAISGSGGGTFYAESVKGRFTISRDNSKNTLYLQMNSLRAEDTAVYYCAKHDYSNYPYFDYWGQGTLVTVSSGGGGSGGGGSGGGGSEIVLTQSPGTLSLSPGERATLSCRASQSIRSNYLAWYQQKPGQAPRLLIYGASSRATGIPDRFSGSGSGTDFTLTISRLEPEDFAVYYCQQYGSSPFTFGCGTKVEIKSGGGGSEVQLVESGGGLVQPGGSLKLSCAASGFTFNKYAMNWVRQAPGKGLEWVARIRSKYNNYATYYADSVKDRFTISRDDSKNTAYLQMNNLKTEDTAVYYCVRHGNFGNSYISYWAYWGQGTLVTVSSGGGGSGGGGSGGGGSQTVVTQEPSLTVSPGGTVTLTCGSSTGAVTSGNYPNWVQQKPGQAPRGLIGGTKFLAPGTPARFSGSLLGGKAALTLSGVQPEDEAEYYCVLWYSNRWVFGGGTKLTVLGGGGDKTHTCPPCPAPELLGGPSVFLFPPKPKDTLMISRTPEVTCVVVDVSHEDPEVKFNWYVDGVEVHNAKTKPCEEQYGSTYRCVSVLTVLHQDWLNGKEYKCKVSNKALPAPIEKTISKAKGQPREPQVYTLPPSREEMTKNQVSLTCLVKGFYPSDIAVEWESNGQPENNYKTTPPVLDSDGSFFLYSKLTVDKSRWQQGNVFSCSVMHEALHNHYTQKSLSLSPGGGGSGGGGSGGGGSGGGGSGGGGSGGGGSDKTHTCPPCPAPELLGGPSVFLFPPKPKDTLMISRTPEVTCVVVDVSHEDPEVKFNWYVDGVEVHNAKTKPCEEQYGSTYRCVSVLTVLHQDWLNGKEYKCKVSNKALPAPIEKTISKAKGQPREPQVYTLPPSREEMTKNQVSLTCLVKGFYPSDIAVEWESNGQPENNYKTTPPVLDSDGSFFLYSKLTVDKSRWQQGNVFSCSVMHEALHNHYTQKSLSLSPGK

SEQ ID NO: 1799 - protein, 984 aa, Artificial Sequence
  Synthetic peptide
EVQLLESGGGLVQPGGSLRLSCAASGFTFSTYAMSWVRQAPGKGLEWVSAISGSGGGTFYAESVKGRFTISRDNSKNTLYLQMNSLRAEDTAVYYCAKHDYSNYPYFDYWGQGTLVTVSSGGGGSGGGGSGGGGSEIVLTQSPGTLSLSPGERATLSCRASQSIRSNYLAWYQQKPGQAPRLLIYGASSRATGIPDRFSGSGSGTDFTLTISRLEPEDFAVYYCQQYGSSPFTFGPGTKVEIKSGGGGSEVQLVESGGGLVQPGGSLKLSCAASGFTFNKYAMNWVRQAPGKGLEWVARIRSKYNNYATYYADSVKDRFTISRDDSKNTAYLQMNNLKTEDTAVYYCVRHGNFGNSYISYWAYWGQGTLVTVSSGGGGSGGGGSGGGGSQTVVTQEPSLTVSPGGTVTLTCGSSTGAVTSGNYPNWVQQKPGQAPRGLIGGTKFLAPGTPARFSGSLLGGKAALTLSGVQPEDEAEYYCVLWYSNRWVFGGGTKLTVLGGGGDKTHTCPPCPAPELLGGPSVFLFPPKPKDTLMISRTPEVTCVVVDVSHEDPEVKFNWYVDGVEVHNAKTKPCEEQYGSTYRCVSVLTVLHQDWLNGKEYKCKVSNKALPAPIEKTISKAKGQPREPQVYTLPPSREEMTKNQVSLTCLVKGFYPSDIAVEWESNGQPENNYKTTPPVLDSDGSFFLYSKLTVDKSRWQQGNVFSCSVMHEALHNHYTQKSLSLSPGGGGSGGGGSGGGGSGGGGSGGGGSGGGGSDKTHTCPPCPAPELLGGPSVFLFPPKPKDTLMISRTPEVTCVVVDVSHEDPEVKFNWYVDGVEVHNAKTKPCEEQYGSTYRCVSVLTVLHQDWLNGKEYKCKVSNKALPAPIEKTISKAKGQPREPQVYTLPPSREEMTKNQVSLTCLVKGFYPSDIAVEWESNGQPENNYKTTPPVLDSDGSFFLYSKLTVDKSRWQQGNVFSCSVMHEALHNHYTQKSLSLSPGK

SEQ ID NO: 1800 - protein, 984 aa, Artificial Sequence
  Synthetic peptide
EVQLLESGGGLVQPGGSLRLSCAASGFTFSTYAMSWVRQAPGKCLEWVSLISGSGGRTYYAESVKGRFTISRDNSKNTLYLQMNSLRAEDTAVYYCAKHDYSNYPYFDYWGQGTLVTVSSGGGGSGGGGSGGGGSEIVLTQSPGTLSLSPGERATLSCRASQSVRSNYLAWYQQKPGQAPRLLIYGASNRATGIPDRFSGSGSGTDFTLTISRLEPEDFAVYSCQQYGISPPTFGCGTKVEIKSGGGGSEVQLVESGGGLVQPGGSLKLSCAASGFTFNKYAMNWVRQAPGKGLEWVARIRSKYNNYATYYADSVKDRFTISRDDSKNTAYLQMNNLKTEDTAVYYCVRHGNFGNSYISYWAYWGQGTLVTVSSGGGGSGGGGSGGGGSQTVVTQEPSLTVSPGGTVTLTCGSSTGAVTSGNYPNWVQQKPGQAPRGLIGGTKFLAPGTPARFSGSLLGGKAALTLSGVQPEDEAEYYCVLWYSNRWVFGGGTKLTVLGGGGDKTHTCPPCPAPELLGGPSVFLFPPKPKDTLMISRTPEVTCVVVDVSHEDPEVKFNWYVDGVEVHNAKTKPCEEQYGSTYRCVSVLTVLHQDWLNGKEYKCKVSNKALPAPIEKTISKAKGQPREPQVYTLPPSREEMTKNQVSLTCLVKGFYPSDIAVEWESNGQPENNYKTTPPVLDSDGSFFLYSKLTVDKSRWQQGNVFSCSVMHEALHNHYTQKSLSLSPGGGGSGGGGSGGGGSGGGGSGGGGSGGGGSDKTHTCPPCPAPELLGGPSVFLFPPKPKDTLMISRTPEVTCVVVDVSHEDPEVKFNWYVDGVEVHNAKTKPCEEQYGSTYRCVSVLTVLHQDWLNGKEYKCKVSNKALPAPIEKTISKAKGQPREPQVYTLPPSREEMTKNQVSLTCLVKGFYPSDIAVEWESNGQPENNYKTTPPVLDSDGSFFLYSKLTVDKSRWQQGNVFSCSVMHEALHNHYTQKSLSLSPGK

SEQ ID NO: 1801 - protein, 984 aa, Artificial Sequence
  Synthetic peptide
EVQLLESGGGLVQPGGSLRLSCAASGFTFSTYAMSWVRQAPGKGLEWVSLISGSGGRTYYAESVKGRFTISRDNSKNTLYLQMNSLRAEDTAVYYCAKHDYSNYPYFDYWGQGTLVTVSSGGGGSGGGGSGGGGSEIVLTQSPGTLSLSPGERATLSCRASQSVRSNYLAWYQQKPGQAPRLLIYGASNRATGIPDRFSGSGSGTDFTLTISRLEPEDFAVYSCQQYGISPPTFGGGTKVEIKSGGGGSEVQLVESGGGLVQPGGSLKLSCAASGFTFNKYAMNWVRQAPGKGLEWVARIRSKYNNYATYYADSVKDRFTISRDDSKNTAYLQMNNLKTEDTAVYYCVRHGNFGNSYISYWAYWGQGTLVTVSSGGGGSGGGGSGGGGSQTVVTQEPSLTVSPGGTVTLTCGSSTGAVTSGNYPNWVQQKPGQAPRGLIGGTKFLAPGTPARFSGSLLGGKAALTLSGVQPEDEAEYYCVLWYSNRWVFGGGTKLTVLGGGGDKTHTCPPCPAPELLGGPSVFLFPPKPKDTLMISRTPEVTCVVVDVSHEDPEVKFNWYVDGVEVHNAKTKPCEEQYGSTYRCVSVLTVLHQDWLNGKEYKCKVSNKALPAPIEKTISKAKGQPREPQVYTLPPSREEMTKNQVSLTCLVKGFYPSDIAVEWESNGQPENNYKTTPPVLDSDGSFFLYSKLTVDKSRWQQGNVFSCSVMHEALHNHYTQKSLSLSPGGGGSGGGGSGGGGSGGGGSGGGGSGGGGSDKTHTCPPCPAPELLGGPSVFLFPPKPKDTLMISRTPEVTCVVVDVSHEDPEVKFNWYVDGVEVHNAKTKPCEEQYGSTYRCVSVLTVLHQDWLNGKEYKCKVSNKALPAPIEKTISKAKGQPREPQVYTLPPSREEMTKNQVSLTCLVKGFYPSDIAVEWESNGQPENNYKTTPPVLDSDGSFFLYSKLTVDKSRWQQGNVFSCSVMHEALHNHYTQKSLSLSPGK

SEQ ID NO: 1802 - protein, 983 aa, Artificial Sequence
  Synthetic peptide
EVQLLESGGGLVQPGGSLRLSCAASGFTFSSYAMSWVRQSPGKCLEWVSAISGSGGRAQYAESVQGRFTVSRDNSKNTLYLQMNSLRAEDTAVYYCAKHDYSNYPYFDYWGQGTLVTVSSGGGGSGGGGSGGGGSEIVLTQSPATLSVSPGERATLSCRASQSVSSNLAWYQQKPGQAPRLLIYGSSSRATGIPDRFSGSGSGTDFTLTISRLEPEDFAVYYCQQYGSSPPPFGCGTKVEIKSGGGGSEVQLVESGGGLVQPGGSLKLSCAASGFTFNKYAMNWVRQAPGKGLEWVARIRSKYNNYATYYADSVKDRFTISRDDSKNTAYLQMNNLKTEDTAVYYCVRHGNFGNSYISYWAYWGQGTLVTVSSGGGGSGGGGSGGGGSQTVVTQEPSLTVSPGGTVTLTCGSSTGAVTSGNYPNWVQQKPGQAPRGLIGGTKFLAPGTPARFSGSLLGGKAALTLSGVQPEDEAEYYCVLWYSNRWVFGGGTKLTVLGGGGDKTHTCPPCPAPELLGGPSVFLFPPKPKDTLMISRTPEVTCVVVDVSHEDPEVKFNWYVDGVEVHNAKTKPCEEQYGSTYRCVSVLTVLHQDWLNGKEYKCKVSNKALPAPIEKTISKAKGQPREPQVYTLPPSREEMTKNQVSLTCLVKGFYPSDIAVEWESNGQPENNYKTTPPVLDSDGSFFLYSKLTVDKSRWQQGNVFSCSVMHEALHNHYTQKSLSLSPGGGGSGGGGSGGGGSGGGGSGGGGSGGGGSDKTHTCPPCPAPELLGGPSVFLFPPKPKDTLMISRTPEVTCVVVDVSHEDPEVKFNWYVDGVEVHNAKTKPCEEQYGSTYRCVSVLTVLHQDWLNGKEYKCKVSNKALPAPIEKTISKAKGQPREPQVYTLPPSREEMTKNQVSLTCLVKGFYPSDIAVEWESNGQPENNYKTTPPVLDSDGSFFLYSKLTVDKSRWQQGNVFSCSVMHEALHNHYTQKSLSLSPGK

SEQ ID NO: 1803 - protein, 983 aa, Artificial Sequence
  Synthetic peptide
EVQLLESGGGLVQPGGSLRLSCAASGFTFSSYAMSWVRQSPGKGLEWVSAISGSGGRAQYAESVQGRFTVSRDNSKNTLYLQMNSLRAEDTAVYYCAKHDYSNYPYFDYWGQGTLVTVSSGGGGSGGGGSGGGGSEIVLTQSPATLSVSPGERATLSCRASQSVSSNLAWYQQKPGQAPRLLIYGSSSRATGIPDRFSGSGSGTDFTLTISRLEPEDFAVYYCQQYGSSPPPFGGGTKVEIKSGGGGSEVQLVESGGGLVQPGGSLKLSCAASGFTFNKYAMNWVRQAPGKGLEWVARIRSKYNNYATYYADSVKDRFTISRDDSKNTAYLQMNNLKTEDTAVYYCVRHGNFGNSYISYWAYWGQGTLVTVSSGGGGSGGGGSGGGGSQTVVTQEPSLTVSPGGTVTLTCGSSTGAVTSGNYPNWVQQKPGQAPRGLIGGTKFLAPGTPARFSGSLLGGKAALTLSGVQPEDEAEYYCVLWYSNRWVFGGGTKLTVLGGGGDKTHTCPPCPAPELLGGPSVFLFPPKPKDTLMISRTPEVTCVVVDVSHEDPEVKFNWYVDGVEVHNAKTKPCEEQYGSTYRCVSVLTVLHQDWLNGKEYKCKVSNKALPAPIEKTISKAKGQPREPQVYTLPPSREEMTKNQVSLTCLVKGFYPSDIAVEWESNGQPENNYKTTPPVLDSDGSFFLYSKLTVDKSRWQQGNVFSCSVMHEALHNHYTQKSLSLSPGGGGSGGGGSGGGGSGGGGSGGGGSGGGGSDKTHTCPPCPAPELLGGPSVFLFPPKPKDTLMISRTPEVTCVVVDVSHEDPEVKFNWYVDGVEVHNAKTKPCEEQYGSTYRCVSVLTVLHQDWLNGKEYKCKVSNKALPAPIEKTISKAKGQPREPQVYTLPPSREEMTKNQVSLTCLVKGFYPSDIAVEWESNGQPENNYKTTPPVLDSDGSFFLYSKLTVDKSRWQQGNVFSCSVMHEALHNHYTQKSLSLSPGK

SEQ ID NO: 1804 - protein, 984 aa, Artificial Sequence
  Synthetic peptide
EVQLLESGGGMVQPGGSLRLSCAASGFTFSSYAMSWVRQAPGKCLEWVSAISGSGGRTFYAESVEGRFTISRDNSKNTLYLQMNSLRAEDTAVYYCTKHDYSNYPYFDYWGQGTLVTVSSGGGGSGGGGSGGGGSEIVLTQSPGTLSLSPGERATLSCRASQGVRSDYLAWYQQKPGQAPRLLIYGASSRATGIPDRFSGSGSGTDFTLTISRLEPEDFAVYHCQQYGSTPPTFGCGTKVEIKSGGGGSEVQLVESGGGLVQPGGSLKLSCAASGFTFNKYAMNWVRQAPGKGLEWVARIRSKYNNYATYYADSVKDRFTISRDDSKNTAYLQMNNLKTEDTAVYYCVRHGNFGNSYISYWAYWGQGTLVTVSSGGGGSGGGGSGGGGSQTVVTQEPSLTVSPGGTVTLTCGSSTGAVTSGNYPNWVQQKPGQAPRGLIGGTKFLAPGTPARFSGSLLGGKAALTLSGVQPEDEAEYYCVLWYSNRWVFGGGTKLTVLGGGGDKTHTCPPCPAPELLGGPSVFLFPPKPKDTLMISRTPEVTCVVVDVSHEDPEVKFNWYVDGVEVHNAKTKPCEEQYGSTYRCVSVLTVLHQDWLNGKEYKCKVSNKALPAPIEKTISKAKGQPREPQVYTLPPSREEMTKNQVSLTCLVKGFYPSDIAVEWESNGQPENNYKTTPPVLDSDGSFFLYSKLTVDKSRWQQGNVFSCSVMHEALHNHYTQKSLSLSPGGGGSGGGGSGGGGSGGGGSGGGGSGGGGSDKTHTCPPCPAPELLGGPSVFLFPPKPKDTLMISRTPEVTCVVVDVSHEDPEVKFNWYVDGVEVHNAKTKPCEEQYGSTYRCVSVLTVLHQDWLNGKEYKCKVSNKALPAPIEKTISKAKGQPREPQVYTLPPSREEMTKNQVSLTCLVKGFYPSDIAVEWESNGQPENNYKTTPPVLDSDGSFFLYSKLTVDKSRWQQGNVFSCSVMHEALHNHYTQKSLSLSPGK

SEQ ID NO: 1805 - protein, 984 aa, Artificial Sequence
  Synthetic peptide
EVQLLESGGGMVQPGGSLRLSCAASGFTFSSYAMSWVRQAPGKGLEWVSAISGSGGRTFYAESVEGRFTISRDNSKNTLYLQMNSLRAEDTAVYYCTKHDYSNYPYFDYWGQGTLVTVSSGGGGSGGGGSGGGGSEIVLTQSPGTLSLSPGERATLSCRASQGVRSDYLAWYQQKPGQAPRLLIYGASSRATGIPDRFSGSGSGTDFTLTISRLEPEDFAVYHCQQYGSTPPTFGGGTKVEIKSGGGGSEVQLVESGGGLVQPGGSLKLSCAASGFTFNKYAMNWVRQAPGKGLEWVARIRSKYNNYATYYADSVKDRFTISRDDSKNTAYLQMNNLKTEDTAVYYCVRHGNFGNSYISYWAYWGQGTLVTVSSGGGGSGGGGSGGGGSQTVVTQEPSLTVSPGGTVTLTCGSSTGAVTSGNYPNWVQQKPGQAPRGLIGGTKFLAPGTPARFSGSLLGGKAALTLSGVQPEDEAEYYCVLWYSNRWVFGGGTKLTVLGGGGDKTHTCPPCPAPELLGGPSVFLFPPKPKDTLMISRTPEVTCVVVDVSHEDPEVKFNWYVDGVEVHNAKTKPCEEQYGSTYRCVSVLTVLHQDWLNGKEYKCKVSNKALPAPIEKTISKAKGQPREPQVYTLPPSREEMTKNQVSLTCLVKGFYPSDIAVEWESNGQPENNYKTTPPVLDSDGSFFLYSKLTVDKSRWQQGNVFSCSVMHEALHNHYTQKSLSLSPGGGGSGGGGSGGGGSGGGGSGGGGSGGGGSDKTHTCPPCPAPELLGGPSVFLFPPKPKDTLMISRTPEVTCVVVDVSHEDPEVKFNWYVDGVEVHNAKTKPCEEQYGSTYRCVSVLTVLHQDWLNGKEYKCKVSNKALPAPIEKTISKAKGQPREPQVYTLPPSREEMTKNQVSLTCLVKGFYPSDIAVEWESNGQPENNYKTTPPVLDSDGSFFLYSKLTVDKSRWQQGNVFSCSVMHEALHNHYTQKSLSLSPGK

SEQ ID NO: 1806 - protein, 984 aa, Artificial Sequence
  Synthetic peptide
EVQLLESGGGLVQPGGSLRLSCAASGFTFSSYAMSWVRQAPGKCLEWVSAIGEGGGYTYYAESVKGRFTISRDNSKNTLSLLMNSLRAEDTAVYYCARHDYSNYPYFDYWGQGTLVTVSSGGGGSGGGGSGGGGSEIVLTQSPGTLSLSPGERATLSCRASQGVRSSYFAWYQQKPGQAPRLLIYGASTRATGIPARFSGSGSGTDFTLTISRLEPEDFAVYYCQQYGSSPPTFGCGTKVEIKSGGGGSEVQLVESGGGLVQPGGSLKLSCAASGFTFNKYAMNWVRQAPGKGLEWVARIRSKYNNYATYYADSVKDRFTISRDDSKNTAYLQMNNLKTEDTAVYYCVRHGNFGNSYISYWAYWGQGTLVTVSSGGGGSGGGGSGGGGSQTVVTQEPSLTVSPGGTVTLTCGSSTGAVTSGNYPNWVQQKPGQAPRGLIGGTKFLAPGTPARFSGSLLGGKAALTLSGVQPEDEAEYYCVLWYSNRWVFGGGTKLTVLGGGGDKTHTCPPCPAPELLGGPSVFLFPPKPKDTLMISRTPEVTCVVVDVSHEDPEVKFNWYVDGVEVHNAKTKPCEEQYGSTYRCVSVLTVLHQDWLNGKEYKCKVSNKALPAPIEKTISKAKGQPREPQVYTLPPSREEMTKNQVSLTCLVKGFYPSDIAVEWESNGQPENNYKTTPPVLDSDGSFFLYSKLTVDKSRWQQGNVFSCSVMHEALHNHYTQKSLSLSPGGGGSGGGGSGGGGSGGGGSGGGGSGGGGSDKTHTCPPCPAPELLGGPSVFLFPPKPKDTLMISRTPEVTCVVVDVSHEDPEVKFNWYVDGVEVHNAKTKPCEEQYGSTYRCVSVLTVLHQDWLNGKEYKCKVSNKALPAPIEKTISKAKGQPREPQVYTLPPSREEMTKNQVSLTCLVKGFYPSDIAVEWESNGQPENNYKTTPPVLDSDGSFFLYSKLTVDKSRWQQGNVFSCSVMHEALHNHYTQKSLSLSPGK

SEQ ID NO: 1807 - protein, 984 aa, Artificial Sequence
  Synthetic peptide
EVQLLESGGGLVQPGGSLRLSCAASGFTFSSYAMSWVRQAPGKGLEWVSAIGEGGGYTYYAESVKGRFTISRDNSKNTLSLLMNSLRAEDTAVYYCARHDYSNYPYFDYWGQGTLVTVSSGGGGSGGGGSGGGGSEIVLTQSPGTLSLSPGERATLSCRASQGVRSSYFAWYQQKPGQAPRLLIYGASTRATGIPARFSGSGSGTDFTLTISRLEPEDFAVYYCQQYGSSPPTFGQGTKVEIKSGGGGSEVQLVESGGGLVQPGGSLKLSCAASGFTFNKYAMNWVRQAPGKGLEWVARIRSKYNNYATYYADSVKDRFTISRDDSKNTAYLQMNNLKTEDTAVYYCVRHGNFGNSYISYWAYWGQGTLVTVSSGGGGSGGGGSGGGGSQTVVTQEPSLTVSPGGTVTLTCGSSTGAVTSGNYPNWVQQKPGQAPRGLIGGTKFLAPGTPARFSGSLLGGKAALTLSGVQPEDEAEYYCVLWYSNRWVFGGGTKLTVLGGGGDKTHTCPPCPAPELLGGPSVFLFPPKPKDTLMISRTPEVTCVVVDVSHEDPEVKFNWYVDGVEVHNAKTKPCEEQYGSTYRCVSVLTVLHQDWLNGKEYKCKVSNKALPAPIEKTISKAKGQPREPQVYTLPPSREEMTKNQVSLTCLVKGFYPSDIAVEWESNGQPENNYKTTPPVLDSDGSFFLYSKLTVDKSRWQQGNVFSCSVMHEALHNHYTQKSLSLSPGGGGSGGGGSGGGGSGGGGSGGGGSGGGGSDKTHTCPPCPAPELLGGPSVFLFPPKPKDTLMISRTPEVTCVVVDVSHEDPEVKFNWYVDGVEVHNAKTKPCEEQYGSTYRCVSVLTVLHQDWLNGKEYKCKVSNKALPAPIEKTISKAKGQPREPQVYTLPPSREEMTKNQVSLTCLVKGFYPSDIAVEWESNGQPENNYKTTPPVLDSDGSFFLYSKLTVDKSRWQQGNVFSCSVMHEALHNHYTQKSLSLSPGK

SEQ ID NO: 1808 - protein, 984 aa, Artificial Sequence
  Synthetic peptide
EVQLLESGGGVVQPGRSLRLSCAASGFTFSSYAMSWVRQAPGKCLEWVSAISGSGGRTFYAESVEGRFTISRDNSKNTLYLQMNSLRAEDTAVYYCAKHDYSNYPYFDYWGQGTLVTVSSGGGGSGGGGSGGGGSEIVLTQSPGTLSLSPGERATLSCRASQSIRSNYLAWYQQKPGQAPRLLIYGASSRATGIPDRFSGSGSGTDFTLTISRLEPEDFAVYYCQQYGSSPPSFGCGTKVEIKSGGGGSEVQLVESGGGLVQPGGSLKLSCAASGFTFNKYAMNWVRQAPGKGLEWVARIRSKYNNYATYYADSVKDRFTISRDDSKNTAYLQMNNLKTEDTAVYYCVRHGNFGNSYISYWAYWGQGTLVTVSSGGGGSGGGGSGGGGSQTVVTQEPSLTVSPGGTVTLTCGSSTGAVTSGNYPNWVQQKPGQAPRGLIGGTKFLAPGTPARFSGSLLGGKAALTLSGVQPEDEAEYYCVLWYSNRWVFGGGTKLTVLGGGGDKTHTCPPCPAPELLGGPSVFLFPPKPKDTLMISRTPEVTCVVVDVSHEDPEVKFNWYVDGVEVHNAKTKPCEEQYGSTYRCVSVLTVLHQDWLNGKEYKCKVSNKALPAPIEKTISKAKGQPREPQVYTLPPSREEMTKNQVSLTCLVKGFYPSDIAVEWESNGQPENNYKTTPPVLDSDGSFFLYSKLTVDKSRWQQGNVFSCSVMHEALHNHYTQKSLSLSPGGGGSGGGGSGGGGSGGGGSGGGGSGGGGSDKTHTCPPCPAPELLGGPSVFLFPPKPKDTLMISRTPEVTCVVVDVSHEDPEVKFNWYVDGVEVHNAKTKPCEEQYGSTYRCVSVLTVLHQDWLNGKEYKCKVSNKALPAPIEKTISKAKGQPREPQVYTLPPSREEMTKNQVSLTCLVKGFYPSDIAVEWESNGQPENNYKTTPPVLDSDGSFFLYSKLTVDKSRWQQGNVFSCSVMHEALHNHYTQKSLSLSPGK

SEQ ID NO: 1809 - protein, 984 aa, Artificial Sequence
  Synthetic peptide
EVQLLESGGGVVQPGRSLRLSCAASGFTFSSYAMSWVRQAPGKGLEWVSAISGSGGRTFYAESVEGRFTISRDNSKNTLYLQMNSLRAEDTAVYYCAKHDYSNYPYFDYWGQGTLVTVSSGGGGSGGGGSGGGGSEIVLTQSPGTLSLSPGERATLSCRASQSIRSNYLAWYQQKPGQAPRLLIYGASSRATGIPDRFSGSGSGTDFTLTISRLEPEDFAVYYCQQYGSSPPSFGQGTKVEIKSGGGGSEVQLVESGGGLVQPGGSLKLSCAASGFTFNKYAMNWVRQAPGKGLEWVARIRSKYNNYATYYADSVKDRFTISRDDSKNTAYLQMNNLKTEDTAVYYCVRHGNFGNSYISYWAYWGQGTLVTVSSGGGGSGGGGSGGGGSQTVVTQEPSLTVSPGGTVTLTCGSSTGAVTSGNYPNWVQQKPGQAPRGLIGGTKFLAPGTPARFSGSLLGGKAALTLSGVQPEDEAEYYCVLWYSNRWVFGGGTKLTVLGGGGDKTHTCPPCPAPELLGGPSVFLFPPKPKDTLMISRTPEVTCVVVDVSHEDPEVKFNWYVDGVEVHNAKTKPCEEQYGSTYRCVSVLTVLHQDWLNGKEYKCKVSNKALPAPIEKTISKAKGQPREPQVYTLPPSREEMTKNQVSLTCLVKGFYPSDIAVEWESNGQPENNYKTTPPVLDSDGSFFLYSKLTVDKSRWQQGNVFSCSVMHEALHNHYTQKSLSLSPGGGGSGGGGSGGGGSGGGGSGGGGSGGGGSDKTHTCPPCPAPELLGGPSVFLFPPKPKDTLMISRTPEVTCVVVDVSHEDPEVKFNWYVDGVEVHNAKTKPCEEQYGSTYRCVSVLTVLHQDWLNGKEYKCKVSNKALPAPIEKTISKAKGQPREPQVYTLPPSREEMTKNQVSLTCLVKGFYPSDIAVEWESNGQPENNYKTTPPVLDSDGSFFLYSKLTVDKSRWQQGNVFSCSVMHEALHNHYTQKSLSLSPGK

SEQ ID NO: 1810 - protein, 984 aa, Artificial Sequence
  Synthetic peptide
EVQLLESGGGVVQPGRSLRLSCAASGFTFSSYAMSWVRQAPGKCLEWVSAISGSGGGTFYAESVEGRFTISRDNSKNTLYLQMNSLRAEDTAVYYCARHDYSNYPYFDYWGLGTLVTVSSGGGGSGGGGSGGGGSEIVLTQSPGTLSLSPGERATLSCRASQSVRSSYLAWYQQKPGQAPRLLIYGASSRATGIPDRFSGSGSGTDFTLTISRLEPEDFAVYSCQQYGDLPFTFGCGTKVEIKSGGGGSEVQLVESGGGLVQPGGSLKLSCAASGFTFNKYAMNWVRQAPGKGLEWVARIRSKYNNYATYYADSVKDRFTISRDDSKNTAYLQMNNLKTEDTAVYYCVRHGNFGNSYISYWAYWGQGTLVTVSSGGGGSGGGGSGGGGSQTVVTQEPSLTVSPGGTVTLTCGSSTGAVTSGNYPNWVQQKPGQAPRGLIGGTKFLAPGTPARFSGSLLGGKAALTLSGVQPEDEAEYYCVLWYSNRWVFGGGTKLTVLGGGGDKTHTCPPCPAPELLGGPSVFLFPPKPKDTLMISRTPEVTCVVVDVSHEDPEVKFNWYVDGVEVHNAKTKPCEEQYGSTYRCVSVLTVLHQDWLNGKEYKCKVSNKALPAPIEKTISKAKGQPREPQVYTLPPSREEMTKNQVSLTCLVKGFYPSDIAVEWESNGQPENNYKTTPPVLDSDGSFFLYSKLTVDKSRWQQGNVFSCSVMHEALHNHYTQKSLSLSPGGGGSGGGGSGGGGSGGGGSGGGGSGGGGSDKTHTCPPCPAPELLGGPSVFLFPPKPKDTLMISRTPEVTCVVVDVSHEDPEVKFNWYVDGVEVHNAKTKPCEEQYGSTYRCVSVLTVLHQDWLNGKEYKCKVSNKALPAPIEKTISKAKGQPREPQVYTLPPSREEMTKNQVSLTCLVKGFYPSDIAVEWESNGQPENNYKTTPPVLDSDGSFFLYSKLTVDKSRWQQGNVFSCSVMHEALHNHYTQKSLSLSPGK

SEQ ID NO: 1811 - protein, 984 aa, Artificial Sequence
  Synthetic peptide
EVQLLESGGGVVQPGRSLRLSCAASGFTFSSYAMSWVRQAPGKGLEWVSAISGSGGGTFYAESVEGRFTISRDNSKNTLYLQMNSLRAEDTAVYYCARHDYSNYPYFDYWGLGTLVTVSSGGGGSGGGGSGGGGSEIVLTQSPGTLSLSPGERATLSCRASQSVRSSYLAWYQQKPGQAPRLLIYGASSRATGIPDRFSGSGSGTDFTLTISRLEPEDFAVYSCQQYGDLPFTFGPGTKVEIKSGGGGSEVQLVESGGGLVQPGGSLKLSCAASGFTFNKYAMNWVRQAPGKGLEWVARIRSKYNNYATYYADSVKDRFTISRDDSKNTAYLQMNNLKTEDTAVYYCVRHGNFGNSYISYWAYWGQGTLVTVSSGGGGSGGGGSGGGGSQTVVTQEPSLTVSPGGTVTLTCGSSTGAVTSGNYPNWVQQKPGQAPRGLIGGTKFLAPGTPARFSGSLLGGKAALTLSGVQPEDEAEYYCVLWYSNRWVFGGGTKLTVLGGGGDKTHTCPPCPAPELLGGPSVFLFPPKPKDTLMISRTPEVTCVVVDVSHEDPEVKFNWYVDGVEVHNAKTKPCEEQYGSTYRCVSVLTVLHQDWLNGKEYKCKVSNKALPAPIEKTISKAKGQPREPQVYTLPPSREEMTKNQVSLTCLVKGFYPSDIAVEWESNGQPENNYKTTPPVLDSDGSFFLYSKLTVDKSRWQQGNVFSCSVMHEALHNHYTQKSLSLSPGGGGSGGGGSGGGGSGGGGSGGGGSGGGGSDKTHTCPPCPAPELLGGPSVFLFPPKPKDTLMISRTPEVTCVVVDVSHEDPEVKFNWYVDGVEVHNAKTKPCEEQYGSTYRCVSVLTVLHQDWLNGKEYKCKVSNKALPAPIEKTISKAKGQPREPQVYTLPPSREEMTKNQVSLTCLVKGFYPSDIAVEWESNGQPENNYKTTPPVLDSDGSFFLYSKLTVDKSRWQQGNVFSCSVMHEALHNHYTQKSLSLSPGK

SEQ ID NO: 1812 - protein, 984 aa, Artificial Sequence
  Synthetic peptide
EVQLLESGGGMVQPGGSLRLSCAASGFTFSSYAMSWVRQAPGKCLEWVSAISGSGGRTFYAESVEGRFTISRDNSKNTLYLQMNSLRAEDTAVYYCTKHDYSNYPYFDYWGQGTLVTVSSGGGGSGGGGSGGGGSEIVLTQSPGTLSLSPGERATLSCRASQSVRSSYLAWYQQKPGQAPRLLIYGASSRATGIPDRFSGSGSGTDFTLTISRLEPEDFAVYYCQQYGDLPFTFGCGTKVDIKSGGGGSEVQLVESGGGLVQPGGSLKLSCAASGFTFNKYAMNWVRQAPGKGLEWVARIRSKYNNYATYYADSVKDRFTISRDDSKNTAYLQMNNLKTEDTAVYYCVRHGNFGNSYISYWAYWGQGTLVTVSSGGGGSGGGGSGGGGSQTVVTQEPSLTVSPGGTVTLTCGSSTGAVTSGNYPNWVQQKPGQAPRGLIGGTKFLAPGTPARFSGSLLGGKAALTLSGVQPEDEAEYYCVLWYSNRWVFGGGTKLTVLGGGGDKTHTCPPCPAPELLGGPSVFLFPPKPKDTLMISRTPEVTCVVVDVSHEDPEVKFNWYVDGVEVHNAKTKPCEEQYGSTYRCVSVLTVLHQDWLNGKEYKCKVSNKALPAPIEKTISKAKGQPREPQVYTLPPSREEMTKNQVSLTCLVKGFYPSDIAVEWESNGQPENNYKTTPPVLDSDGSFFLYSKLTVDKSRWQQGNVFSCSVMHEALHNHYTQKSLSLSPGGGGSGGGGSGGGGSGGGGSGGGGSGGGGSDKTHTCPPCPAPELLGGPSVFLFPPKPKDTLMISRTPEVTCVVVDVSHEDPEVKFNWYVDGVEVHNAKTKPCEEQYGSTYRCVSVLTVLHQDWLNGKEYKCKVSNKALPAPIEKTISKAKGQPREPQVYTLPPSREEMTKNQVSLTCLVKGFYPSDIAVEWESNGQPENNYKTTPPVLDSDGSFFLYSKLTVDKSRWQQGNVFSCSVMHEALHNHYTQKSLSLSPGK

SEQ ID NO: 1813 - protein, 984 aa, Artificial Sequence
  Synthetic peptide
EVQLLESGGGMVQPGGSLRLSCAASGFTFSSYAMSWVRQAPGKGLEWVSAISGSGGRTFYAESVEGRFTISRDNSKNTLYLQMNSLRAEDTAVYYCTKHDYSNYPYFDYWGQGTLVTVSSGGGGSGGGGSGGGGSEIVLTQSPGTLSLSPGERATLSCRASQSVRSSYLAWYQQKPGQAPRLLIYGASSRATGIPDRFSGSGSGTDFTLTISRLEPEDFAVYYCQQYGDLPFTFGPGTKVDIKSGGGGSEVQLVESGGGLVQPGGSLKLSCAASGFTFNKYAMNWVRQAPGKGLEWVARIRSKYNNYATYYADSVKDRFTISRDDSKNTAYLQMNNLKTEDTAVYYCVRHGNFGNSYISYWAYWGQGTLVTVSSGGGGSGGGGSGGGGSQTVVTQEPSLTVSPGGTVTLTCGSSTGAVTSGNYPNWVQQKPGQAPRGLIGGTKFLAPGTPARFSGSLLGGKAALTLSGVQPEDEAEYYCVLWYSNRWVFGGGTKLTVLGGGGDKTHTCPPCPAPELLGGPSVFLFPPKPKDTLMISRTPEVTCVVVDVSHEDPEVKFNWYVDGVEVHNAKTKPCEEQYGSTYRCVSVLTVLHQDWLNGKEYKCKVSNKALPAPIEKTISKAKGQPREPQVYTLPPSREEMTKNQVSLTCLVKGFYPSDIAVEWESNGQPENNYKTTPPVLDSDGSFFLYSKLTVDKSRWQQGNVFSCSVMHEALHNHYTQKSLSLSPGGGGSGGGGSGGGGSGGGGSGGGGSGGGGSDKTHTCPPCPAPELLGGPSVFLFPPKPKDTLMISRTPEVTCVVVDVSHEDPEVKFNWYVDGVEVHNAKTKPCEEQYGSTYRCVSVLTVLHQDWLNGKEYKCKVSNKALPAPIEKTISKAKGQPREPQVYTLPPSREEMTKNQVSLTCLVKGFYPSDIAVEWESNGQPENNYKTTPPVLDSDGSFFLYSKLTVDKSRWQQGNVFSCSVMHEALHNHYTQKSLSLSPGK

SEQ ID NO: 1814 - protein, 984 aa, Artificial Sequence
  Synthetic peptide
EVQLLESGGGLVQPGGSLRLSCAASGFTFSTYAMSWVRQAPGKCLEWVSLISGSGGRTYYAESVKGRFTISRDNSKNTLYLQMNSLRAEDTAVYYCAKHDYSNYPYFDYWGQGTLVTVSSGGGGSGGGGSGGGGSEIVLTQSPGTLSLSPGERATLSCRASQGVRSSYLAWYQQKPGQAPRLLIYGASSRATGIPDRFSGSGSGTDFTLTINRLEPEDFAVYYCQQYGSSPPTFGCGTKVDIKSGGGGSEVQLVESGGGLVQPGGSLKLSCAASGFTFNKYAMNWVRQAPGKGLEWVARIRSKYNNYATYYADSVKDRFTISRDDSKNTAYLQMNNLKTEDTAVYYCVRHGNFGNSYISYWAYWGQGTLVTVSSGGGGSGGGGSGGGGSQTVVTQEPSLTVSPGGTVTLTCGSSTGAVTSGNYPNWVQQKPGQAPRGLIGGTKFLAPGTPARFSGSLLGGKAALTLSGVQPEDEAEYYCVLWYSNRWVFGGGTKLTVLGGGGDKTHTCPPCPAPELLGGPSVFLFPPKPKDTLMISRTPEVTCVVVDVSHEDPEVKFNWYVDGVEVHNAKTKPCEEQYGSTYRCVSVLTVLHQDWLNGKEYKCKVSNKALPAPIEKTISKAKGQPREPQVYTLPPSREEMTKNQVSLTCLVKGFYPSDIAVEWESNGQPENNYKTTPPVLDSDGSFFLYSKLTVDKSRWQQGNVFSCSVMHEALHNHYTQKSLSLSPGGGGSGGGGSGGGGSGGGGSGGGGSGGGGSDKTHTCPPCPAPELLGGPSVFLFPPKPKDTLMISRTPEVTCVVVDVSHEDPEVKFNWYVDGVEVHNAKTKPCEEQYGSTYRCVSVLTVLHQDWLNGKEYKCKVSNKALPAPIEKTISKAKGQPREPQVYTLPPSREEMTKNQVSLTCLVKGFYPSDIAVEWESNGQPENNYKTTPPVLDSDGSFFLYSKLTVDKSRWQQGNVFSCSVMHEALHNHYTQKSLSLSPGK

SEQ ID NO: 1815 - protein, 984 aa, Artificial Sequence
  Synthetic peptide
EVQLLESGGGLVQPGGSLRLSCAASGFTFSTYAMSWVRQAPGKGLEWVSLISGSGGRTYYAESVKGRFTISRDNSKNTLYLQMNSLRAEDTAVYYCAKHDYSNYPYFDYWGQGTLVTVSSGGGGSGGGGSGGGGSEIVLTQSPGTLSLSPGERATLSCRASQGVRSSYLAWYQQKPGQAPRLLIYGASSRATGIPDRFSGSGSGTDFTLTINRLEPEDFAVYYCQQYGSSPPTFGGGTKVDIKSGGGGSEVQLVESGGGLVQPGGSLKLSCAASGFTFNKYAMNWVRQAPGKGLEWVARIRSKYNNYATYYADSVKDRFTISRDDSKNTAYLQMNNLKTEDTAVYYCVRHGNFGNSYISYWAYWGQGTLVTVSSGGGGSGGGGSGGGGSQTVVTQEPSLTVSPGGTVTLTCGSSTGAVTSGNYPNWVQQKPGQAPRGLIGGTKFLAPGTPARFSGSLLGGKAALTLSGVQPEDEAEYYCVLWYSNRWVFGGGTKLTVLGGGGDKTHTCPPCPAPELLGGPSVFLFPPKPKDTLMISRTPEVTCVVVDVSHEDPEVKFNWYVDGVEVHNAKTKPCEEQYGSTYRCVSVLTVLHQDWLNGKEYKCKVSNKALPAPIEKTISKAKGQPREPQVYTLPPSREEMTKNQVSLTCLVKGFYPSDIAVEWESNGQPENNYKTTPPVLDSDGSFFLYSKLTVDKSRWQQGNVFSCSVMHEALHNHYTQKSLSLSPGGGGSGGGGSGGGGSGGGGSGGGGSGGGGSDKTHTCPPCPAPELLGGPSVFLFPPKPKDTLMISRTPEVTCVVVDVSHEDPEVKFNWYVDGVEVHNAKTKPCEEQYGSTYRCVSVLTVLHQDWLNGKEYKCKVSNKALPAPIEKTISKAKGQPREPQVYTLPPSREEMTKNQVSLTCLVKGFYPSDIAVEWESNGQPENNYKTTPPVLDSDGSFFLYSKLTVDKSRWQQGNVFSCSVMHEALHNHYTQKSLSLSPGK

SEQ ID NO: 1816 - protein, 984 aa, Artificial Sequence
  Synthetic peptide
EVQLLESGGGVVQPGRSLRLSCAASGFTFSSYAMSWVRQAPGKCLEWVSAISGSGGRTFYAESVEGRFTISRDNSKNTLYLQMNSLRAEDTAVYYCAKHDYSNYPYFDYWGQGTLVTVSSGGGGSGGGGSGGGGSEIVLTQSPGTLSLSPGERATLSCRASQSVRSNYLAWYQQKPGQAPRLLIYGASSRATGIPDRFSGSGSGTDFTLTINRLEPEDFAVYYCQQYGSSPPTFGCGTKVDIKSGGGGSEVQLVESGGGLVQPGGSLKLSCAASGFTFNKYAMNWVRQAPGKGLEWVARIRSKYNNYATYYADSVKDRFTISRDDSKNTAYLQMNNLKTEDTAVYYCVRHGNFGNSYISYWAYWGQGTLVTVSSGGGGSGGGGSGGGGSQTVVTQEPSLTVSPGGTVTLTCGSSTGAVTSGNYPNWVQQKPGQAPRGLIGGTKFLAPGTPARFSGSLLGGKAALTLSGVQPEDEAEYYCVLWYSNRWVFGGGTKLTVLGGGGDKTHTCPPCPAPELLGGPSVFLFPPKPKDTLMISRTPEVTCVVVDVSHEDPEVKFNWYVDGVEVHNAKTKPCEEQYGSTYRCVSVLTVLHQDWLNGKEYKCKVSNKALPAPIEKTISKAKGQPREPQVYTLPPSREEMTKNQVSLTCLVKGFYPSDIAVEWESNGQPENNYKTTPPVLDSDGSFFLYSKLTVDKSRWQQGNVFSCSVMHEALHNHYTQKSLSLSPGGGGSGGGGSGGGGSGGGGSGGGGSGGGGSDKTHTCPPCPAPELLGGPSVFLFPPKPKDTLMISRTPEVTCVVVDVSHEDPEVKFNWYVDGVEVHNAKTKPCEEQYGSTYRCVSVLTVLHQDWLNGKEYKCKVSNKALPAPIEKTISKAKGQPREPQVYTLPPSREEMTKNQVSLTCLVKGFYPSDIAVEWESNGQPENNYKTTPPVLDSDGSFFLYSKLTVDKSRWQQGNVFSCSVMHEALHNHYTQKSLSLSPGK

SEQ ID NO: 1817 - protein, 984 aa, Artificial Sequence
  Synthetic peptide
EVQLLESGGGVVQPGRSLRLSCAASGFTFSSYAMSWVRQAPGKGLEWVSAISGSGGRTFYAESVEGRFTISRDNSKNTLYLQMNSLRAEDTAVYYCAKHDYSNYPYFDYWGQGTLVTVSSGGGGSGGGGSGGGGSEIVLTQSPGTLSLSPGERATLSCRASQSVRSNYLAWYQQKPGQAPRLLIYGASSRATGIPDRFSGSGSGTDFTLTINRLEPEDFAVYYCQQYGSSPPTFGGGTKVDIKSGGGGSEVQLVESGGGLVQPGGSLKLSCAASGFTFNKYAMNWVRQAPGKGLEWVARIRSKYNNYATYYADSVKDRFTISRDDSKNTAYLQMNNLKTEDTAVYYCVRHGNFGNSYISYWAYWGQGTLVTVSSGGGGSGGGGSGGGGSQTVVTQEPSLTVSPGGTVTLTCGSSTGAVTSGNYPNWVQQKPGQAPRGLIGGTKFLAPGTPARFSGSLLGGKAALTLSGVQPEDEAEYYCVLWYSNRWVFGGGTKLTVLGGGGDKTHTCPPCPAPELLGGPSVFLFPPKPKDTLMISRTPEVTCVVVDVSHEDPEVKFNWYVDGVEVHNAKTKPCEEQYGSTYRCVSVLTVLHQDWLNGKEYKCKVSNKALPAPIEKTISKAKGQPREPQVYTLPPSREEMTKNQVSLTCLVKGFYPSDIAVEWESNGQPENNYKTTPPVLDSDGSFFLYSKLTVDKSRWQQGNVFSCSVMHEALHNHYTQKSLSLSPGGGGSGGGGSGGGGSGGGGSGGGGSGGGGSDKTHTCPPCPAPELLGGPSVFLFPPKPKDTLMISRTPEVTCVVVDVSHEDPEVKFNWYVDGVEVHNAKTKPCEEQYGSTYRCVSVLTVLHQDWLNGKEYKCKVSNKALPAPIEKTISKAKGQPREPQVYTLPPSREEMTKNQVSLTCLVKGFYPSDIAVEWESNGQPENNYKTTPPVLDSDGSFFLYSKLTVDKSRWQQGNVFSCSVMHEALHNHYTQKSLSLSPGK

SEQ ID NO: 1818 - protein, 983 aa, Artificial Sequence
  Synthetic peptide
EVQLLESGGGLVQPGGSLRLSCAASGFTFSSYAMSWVRQAPGKCLEWVSVISGSGGITDFAESVKGRFTISRDNSRNTLYLQMNSLRAEDTAVYFCARHDYSNYFFFDYWGQGTLVTVSSGGGGSGGGGSGGGGSDIQMTQSPSSLSASVGDRVTITCRASQGISNYLAWYQQKPGKVPKLLIYAASILQSGVPSKFSGSGSGTDFTLTISSLQPEDFAIYYCQQYFAYPITFGCGTRLEIKSGGGGSEVQLVESGGGLVQPGGSLKLSCAASGFTFNKYAMNWVRQAPGKGLEWVARIRSKYNNYATYYADSVKDRFTISRDDSKNTAYLQMNNLKTEDTAVYYCVRHGNFGNSYISYWAYWGQGTLVTVSSGGGGSGGGGSGGGGSQTVVTQEPSLTVSPGGTVTLTCGSSTGAVTSGNYPNWVQQKPGQAPRGLIGGTKFLAPGTPARFSGSLLGGKAALTLSGVQPEDEAEYYCVLWYSNRWVFGGGTKLTVLGGGGDKTHTCPPCPAPELLGGPSVFLFPPKPKDTLMISRTPEVTCVVVDVSHEDPEVKFNWYVDGVEVHNAKTKPCEEQYGSTYRCVSVLTVLHQDWLNGKEYKCKVSNKALPAPIEKTISKAKGQPREPQVYTLPPSREEMTKNQVSLTCLVKGFYPSDIAVEWESNGQPENNYKTTPPVLDSDGSFFLYSKLTVDKSRWQQGNVFSCSVMHEALHNHYTQKSLSLSPGGGGSGGGGSGGGGSGGGGSGGGGSGGGGSDKTHTCPPCPAPELLGGPSVFLFPPKPKDTLMISRTPEVTCVVVDVSHEDPEVKFNWYVDGVEVHNAKTKPCEEQYGSTYRCVSVLTVLHQDWLNGKEYKCKVSNKALPAPIEKTISKAKGQPREPQVYTLPPSREEMTKNQVSLTCLVKGFYPSDIAVEWESNGQPENNYKTTPPVLDSDGSFFLYSKLTVDKSRWQQGNVFSCSVMHEALHNHYTQKSLSLSPGK

SEQ ID NO: 1819 - protein, 983 aa, Artificial Sequence
  Synthetic peptide
EVQLLESGGGLVQPGGSLRLSCAASGFTFSSYAMSWVRQAPGKGLEWVSVISGSGGITDFAESVKGRFTISRDNSRNTLYLQMNSLRAEDTAVYFCARHDYSNYFFFDYWGQGTLVTVSSGGGGSGGGGSGGGGSDIQMTQSPSSLSASVGDRVTITCRASQGISNYLAWYQQKPGKVPKLLIYAASILQSGVPSKFSGSGSGTDFTLTISSLQPEDFAIYYCQQYFAYPITFGQGTRLEIKSGGGGSEVQLVESGGGLVQPGGSLKLSCAASGFTFNKYAMNWVRQAPGKGLEWVARIRSKYNNYATYYADSVKDRFTISRDDSKNTAYLQMNNLKTEDTAVYYCVRHGNFGNSYISYWAYWGQGTLVTVSSGGGGSGGGGSGGGGSQTVVTQEPSLTVSPGGTVTLTCGSSTGAVTSGNYPNWVQQKPGQAPRGLIGGTKFLAPGTPARFSGSLLGGKAALTLSGVQPEDEAEYYCVLWYSNRWVFGGGTKLTVLGGGGDKTHTCPPCPAPELLGGPSVFLFPPKPKDTLMISRTPEVTCVVVDVSHEDPEVKFNWYVDGVEVHNAKTKPCEEQYGSTYRCVSVLTVLHQDWLNGKEYKCKVSNKALPAPIEKTISKAKGQPREPQVYTLPPSREEMTKNQVSLTCLVKGFYPSDIAVEWESNGQPENNYKTTPPVLDSDGSFFLYSKLTVDKSRWQQGNVFSCSVMHEALHNHYTQKSLSLSPGGGGSGGGGSGGGGSGGGGSGGGGSGGGGSDKTHTCPPCPAPELLGGPSVFLFPPKPKDTLMISRTPEVTCVVVDVSHEDPEVKFNWYVDGVEVHNAKTKPCEEQYGSTYRCVSVLTVLHQDWLNGKEYKCKVSNKALPAPIEKTISKAKGQPREPQVYTLPPSREEMTKNQVSLTCLVKGFYPSDIAVEWESNGQPENNYKTTPPVLDSDGSFFLYSKLTVDKSRWQQGNVFSCSVMHEALHNHYTQKSLSLSPGK

SEQ ID NO: 1820 - protein, 984 aa, Artificial Sequence
  Synthetic peptide
EVQLLESGGGMVQPGGSLRLSCAASGFTFSSYAMSWVRQAPGKCLEWVSAISGSGGRTFYAESVEGRFTISRDNSKNTLYLQMNSLRAEDTAVYYCAKHDYSNYPYFDYWGQGTLVTVSSGGGGSGGGGSGGGGSEIVLTQSPGTLSLSPGERATLSCRASQSVRSSYLAWYQQKPGQAPRLLIYGASSRATGIPDRFSGSGSGTDFTLTISRLEPEDFAVYFCQQYGSSPPTFGCGTRLEIKSGGGGSEVQLVESGGGLVQPGGSLKLSCAASGFTFNKYAMNWVRQAPGKGLEWVARIRSKYNNYATYYADSVKDRFTISRDDSKNTAYLQMNNLKTEDTAVYYCVRHGNFGNSYISYWAYWGQGTLVTVSSGGGGSGGGGSGGGGSQTVVTQEPSLTVSPGGTVTLTCGSSTGAVTSGNYPNWVQQKPGQAPRGLIGGTKFLAPGTPARFSGSLLGGKAALTLSGVQPEDEAEYYCVLWYSNRWVFGGGTKLTVLGGGGDKTHTCPPCPAPELLGGPSVFLFPPKPKDTLMISRTPEVTCVVVDVSHEDPEVKFNWYVDGVEVHNAKTKPCEEQYGSTYRCVSVLTVLHQDWLNGKEYKCKVSNKALPAPIEKTISKAKGQPREPQVYTLPPSREEMTKNQVSLTCLVKGFYPSDIAVEWESNGQPENNYKTTPPVLDSDGSFFLYSKLTVDKSRWQQGNVFSCSVMHEALHNHYTQKSLSLSPGGGGSGGGGSGGGGSGGGGSGGGGSGGGGSDKTHTCPPCPAPELLGGPSVFLFPPKPKDTLMISRTPEVTCVVVDVSHEDPEVKFNWYVDGVEVHNAKTKPCEEQYGSTYRCVSVLTVLHQDWLNGKEYKCKVSNKALPAPIEKTISKAKGQPREPQVYTLPPSREEMTKNQVSLTCLVKGFYPSDIAVEWESNGQPENNYKTTPPVLDSDGSFFLYSKLTVDKSRWQQGNVFSCSVMHEALHNHYTQKSLSLSPGK

SEQ ID NO: 1821 - protein, 984 aa, Artificial Sequence
  Synthetic peptide
EVQLLESGGGMVQPGGSLRLSCAASGFTFSSYAMSWVRQAPGKGLEWVSAISGSGGRTFYAESVEGRFTISRDNSKNTLYLQMNSLRAEDTAVYYCAKHDYSNYPYFDYWGQGTLVTVSSGGGGSGGGGSGGGGSEIVLTQSPGTLSLSPGERATLSCRASQSVRSSYLAWYQQKPGQAPRLLIYGASSRATGIPDRFSGSGSGTDFTLTISRLEPEDFAVYFCQQYGSSPPTFGGGTRLEIKSGGGGSEVQLVESGGGLVQPGGSLKLSCAASGFTFNKYAMNWVRQAPGKGLEWVARIRSKYNNYATYYADSVKDRFTISRDDSKNTAYLQMNNLKTEDTAVYYCVRHGNFGNSYISYWAYWGQGTLVTVSSGGGGSGGGGSGGGGSQTVVTQEPSLTVSPGGTVTLTCGSSTGAVTSGNYPNWVQQKPGQAPRGLIGGTKFLAPGTPARFSGSLLGGKAALTLSGVQPEDEAEYYCVLWYSNRWVFGGGTKLTVLGGGGDKTHTCPPCPAPELLGGPSVFLFPPKPKDTLMISRTPEVTCVVVDVSHEDPEVKFNWYVDGVEVHNAKTKPCEEQYGSTYRCVSVLTVLHQDWLNGKEYKCKVSNKALPAPIEKTISKAKGQPREPQVYTLPPSREEMTKNQVSLTCLVKGFYPSDIAVEWESNGQPENNYKTTPPVLDSDGSFFLYSKLTVDKSRWQQGNVFSCSVMHEALHNHYTQKSLSLSPGGGGSGGGGSGGGGSGGGGSGGGGSGGGGSDKTHTCPPCPAPELLGGPSVFLFPPKPKDTLMISRTPEVTCVVVDVSHEDPEVKFNWYVDGVEVHNAKTKPCEEQYGSTYRCVSVLTVLHQDWLNGKEYKCKVSNKALPAPIEKTISKAKGQPREPQVYTLPPSREEMTKNQVSLTCLVKGFYPSDIAVEWESNGQPENNYKTTPPVLDSDGSFFLYSKLTVDKSRWQQGNVFSCSVMHEALHNHYTQKSLSLSPGK

SEQ ID NO: 1822 - protein, 984 aa, Artificial Sequence
  Synthetic peptide
EVQLLESGGGLVQPGGSLRLSCAASGFTFSIYAMSWVRQAPGKCLEWVSAIGGSGGSTFYAESVKGRFTISRDNSKNTLYLQMNSLRAEDTAVYYCAKHDYSNYPYFDYWGQGTLVTVSSGGGGSGGGGSGGGGSEIVLTQSPGTLSLSPGERATLSCRASQSVRSSYVAWYQQKPGQAPRLLIYGASSRATGIPDRFSGSGSGTDFTLTISRLEPEDFAVYYCQQYGDLPFTFGCGTRLEIKSGGGGSEVQLVESGGGLVQPGGSLKLSCAASGFTFNKYAMNWVRQAPGKGLEWVARIRSKYNNYATYYADSVKDRFTISRDDSKNTAYLQMNNLKTEDTAVYYCVRHGNFGNSYISYWAYWGQGTLVTVSSGGGGSGGGGSGGGGSQTVVTQEPSLTVSPGGTVTLTCGSSTGAVTSGNYPNWVQQKPGQAPRGLIGGTKFLAPGTPARFSGSLLGGKAALTLSGVQPEDEAEYYCVLWYSNRWVFGGGTKLTVLGGGGDKTHTCPPCPAPELLGGPSVFLFPPKPKDTLMISRTPEVTCVVVDVSHEDPEVKFNWYVDGVEVHNAKTKPCEEQYGSTYRCVSVLTVLHQDWLNGKEYKCKVSNKALPAPIEKTISKAKGQPREPQVYTLPPSREEMTKNQVSLTCLVKGFYPSDIAVEWESNGQPENNYKTTPPVLDSDGSFFLYSKLTVDKSRWQQGNVFSCSVMHEALHNHYTQKSLSLSPGGGGSGGGGSGGGGSGGGGSGGGGSGGGGSDKTHTCPPCPAPELLGGPSVFLFPPKPKDTLMISRTPEVTCVVVDVSHEDPEVKFNWYVDGVEVHNAKTKPCEEQYGSTYRCVSVLTVLHQDWLNGKEYKCKVSNKALPAPIEKTISKAKGQPREPQVYTLPPSREEMTKNQVSLTCLVKGFYPSDIAVEWESNGQPENNYKTTPPVLDSDGSFFLYSKLTVDKSRWQQGNVFSCSVMHEALHNHYTQKSLSLSPGK

SEQ ID NO: 1823 - protein, 984 aa, Artificial Sequence
  Synthetic peptide
EVQLLESGGGLVQPGGSLRLSCAASGFTFSIYAMSWVRQAPGKGLEWVSAIGGSGGSTFYAESVKGRFTISRDNSKNTLYLQMNSLRAEDTAVYYCAKHDYSNYPYFDYWGQGTLVTVSSGGGGSGGGGSGGGGSEIVLTQSPGTLSLSPGERATLSCRASQSVRSSYVAWYQQKPGQAPRLLIYGASSRATGIPDRFSGSGSGTDFTLTISRLEPEDFAVYYCQQYGDLPFTFGPGTRLEIKSGGGGSEVQLVESGGGLVQPGGSLKLSCAASGFTFNKYAMNWVRQAPGKGLEWVARIRSKYNNYATYYADSVKDRFTISRDDSKNTAYLQMNNLKTEDTAVYYCVRHGNFGNSYISYWAYWGQGTLVTVSSGGGGSGGGGSGGGGSQTVVTQEPSLTVSPGGTVTLTCGSSTGAVTSGNYPNWVQQKPGQAPRGLIGGTKFLAPGTPARFSGSLLGGKAALTLSGVQPEDEAEYYCVLWYSNRWVFGGGTKLTVLGGGGDKTHTCPPCPAPELLGGPSVFLFPPKPKDTLMISRTPEVTCVVVDVSHEDPEVKFNWYVDGVEVHNAKTKPCEEQYGSTYRCVSVLTVLHQDWLNGKEYKCKVSNKALPAPIEKTISKAKGQPREPQVYTLPPSREEMTKNQVSLTCLVKGFYPSDIAVEWESNGQPENNYKTTPPVLDSDGSFFLYSKLTVDKSRWQQGNVFSCSVMHEALHNHYTQKSLSLSPGGGGSGGGGSGGGGSGGGGSGGGGSGGGGSDKTHTCPPCPAPELLGGPSVFLFPPKPKDTLMISRTPEVTCVVVDVSHEDPEVKFNWYVDGVEVHNAKTKPCEEQYGSTYRCVSVLTVLHQDWLNGKEYKCKVSNKALPAPIEKTISKAKGQPREPQVYTLPPSREEMTKNQVSLTCLVKGFYPSDIAVEWESNGQPENNYKTTPPVLDSDGSFFLYSKLTVDKSRWQQGNVFSCSVMHEALHNHYTQKSLSLSPGK

SEQ ID NO: 1824 - protein, 988 aa, Artificial Sequence; identical to SEQ ID NO: 1689
  Synthetic peptide

SEQ ID NO: 1825 - protein, 988 aa, Artificial Sequence; identical to SEQ ID NO: 1688
  Synthetic peptide

SEQ ID NO: 1826 - protein, 983 aa, Artificial Sequence
  Synthetic peptide
EVQLVESGGGLVKPGGSLRLSCAASGFTFSSYSMNWVRQAPGKCLEWVSYISSSGGYIYYAESVKGRFTISRDNAKNSLYLQMNSLRAEDAAVYYCSRGDYSNYAYFDYWGQGTLVTVSSGGGGSGGGGSGGGGSDIQMTQSPSSLSASVGDRVTITCRASQGISNYLAWYQQKPGKVPKLLIYAASTLQSGVPSRFSGSGSGTDFTLTISSLQAEDVAVYYCQQYYSTPLTFGCGTKVEIKSGGGGSEVQLVESGGGLVQPGGSLKLSCAASGFTFNKYAMNWVRQAPGKGLEWVARIRSKYNNYATYYADSVKDRFTISRDDSKNTAYLQMNNLKTEDTAVYYCVRHGNFGNSYISYWAYWGQGTLVTVSSGGGGSGGGGSGGGGSQTVVTQEPSLTVSPGGTVTLTCGSSTGAVTSGNYPNWVQQKPGQAPRGLIGGTKFLAPGTPARFSGSLLGGKAALTLSGVQPEDEAEYYCVLWYSNRWVFGGGTKLTVLGGGGDKTHTCPPCPAPELLGGPSVFLFPPKPKDTLMISRTPEVTCVVVDVSHEDPEVKFNWYVDGVEVHNAKTKPCEEQYGSTYRCVSVLTVLHQDWLNGKEYKCKVSNKALPAPIEKTISKAKGQPREPQVYTLPPSREEMTKNQVSLTCLVKGFYPSDIAVEWESNGQPENNYKTTPPVLDSDGSFFLYSKLTVDKSRWQQGNVFSCSVMHEALHNHYTQKSLSLSPGGGGSGGGGSGGGGSGGGGSGGGGSGGGGSDKTHTCPPCPAPELLGGPSVFLFPPKPKDTLMISRTPEVTCVVVDVSHEDPEVKFNWYVDGVEVHNAKTKPCEEQYGSTYRCVSVLTVLHQDWLNGKEYKCKVSNKALPAPIEKTISKAKGQPREPQVYTLPPSREEMTKNQVSLTCLVKGFYPSDIAVEWESNGQPENNYKTTPPVLDSDGSFFLYSKLTVDKSRWQQGNVFSCSVMHEALHNHYTQKSLSLSPGK

SEQ ID NO: 1827 - protein, 983 aa, Artificial Sequence
  Synthetic peptide
EVQLVESGGGLVKPGGSLRLSCAASGFTFSSYSMNWVRQAPGKGLEWVSYISSSGGYIYYAESVKGRFTISRDNAKNSLYLQMNSLRAEDAAVYYCSRGDYSNYAYFDYWGQGTLVTVSSGGGGSGGGGSGGGGSDIQMTQSPSSLSASVGDRVTITCRASQGISNYLAWYQQKPGKVPKLLIYAASTLQSGVPSRFSGSGSGTDFTLTISSLQAEDVAVYYCQQYYSTPLTFGGGTKVEIKSGGGGSEVQLVESGGGLVQPGGSLKLSCAASGFTFNKYAMNWVRQAPGKGLEWVARIRSKYNNYATYYADSVKDRFTISRDDSKNTAYLQMNNLKTEDTAVYYCVRHGNFGNSYISYWAYWGQGTLVTVSSGGGGSGGGGSGGGGSQTVVTQEPSLTVSPGGTVTLTCGSSTGAVTSGNYPNWVQQKPGQAPRGLIGGTKFLAPGTPARFSGSLLGGKAALTLSGVQPEDEAEYYCVLWYSNRWVFGGGTKLTVLGGGGDKTHTCPPCPAPELLGGPSVFLFPPKPKDTLMISRTPEVTCVVVDVSHEDPEVKFNWYVDGVEVHNAKTKPCEEQYGSTYRCVSVLTVLHQDWLNGKEYKCKVSNKALPAPIEKTISKAKGQPREPQVYTLPPSREEMTKNQVSLTCLVKGFYPSDIAVEWESNGQPENNYKTTPPVLDSDGSFFLYSKLTVDKSRWQQGNVFSCSVMHEALHNHYTQKSLSLSPGGGGSGGGGSGGGGSGGGGSGGGGSGGGGSDKTHTCPPCPAPELLGGPSVFLFPPKPKDTLMISRTPEVTCVVVDVSHEDPEVKFNWYVDGVEVHNAKTKPCEEQYGSTYRCVSVLTVLHQDWLNGKEYKCKVSNKALPAPIEKTISKAKGQPREPQVYTLPPSREEMTKNQVSLTCLVKGFYPSDIAVEWESNGQPENNYKTTPPVLDSDGSFFLYSKLTVDKSRWQQGNVFSCSVMHEALHNHYTQKSLSLSPGK

SEQ ID NO: 1828 - protein, 984 aa, Artificial Sequence
  Synthetic peptide
EVQLLESGGGLVQPGGSLRLSCAASGFTFSVYAMSWVRQAPGKCLEWVSTISGSGGSTFYAESVKGRFTISRDNSKNTLYLQMNRLRAEDTAVYYCARHDYSNYAYFDYWGQGTLVTVSSGGGGSGGGGSGGGGSEIVLTQSPGTLSLSPGERATLSCRASQSVRSSYLAWYQQKPGQAPRLLIYGASSRATGIPDRFSGSGSGTDFTLTISRLEPEDFAVYYCQQYGDLPFTFGCGTKVEIKSGGGGSEVQLVESGGGLVQPGGSLKLSCAASGFTFNKYAMNWVRQAPGKGLEWVARIRSKYNNYATYYADSVKDRFTISRDDSKNTAYLQMNNLKTEDTAVYYCVRHGNFGNSYISYWAYWGQGTLVTVSSGGGGSGGGGSGGGGSQTVVTQEPSLTVSPGGTVTLTCGSSTGAVTSGNYPNWVQQKPGQAPRGLIGGTKFLAPGTPARFSGSLLGGKAALTLSGVQPEDEAEYYCVLWYSNRWVFGGGTKLTVLGGGGDKTHTCPPCPAPELLGGPSVFLFPPKPKDTLMISRTPEVTCVVVDVSHEDPEVKFNWYVDGVEVHNAKTKPCEEQYGSTYRCVSVLTVLHQDWLNGKEYKCKVSNKALPAPIEKTISKAKGQPREPQVYTLPPSREEMTKNQVSLTCLVKGFYPSDIAVEWESNGQPENNYKTTPPVLDSDGSFFLYSKLTVDKSRWQQGNVFSCSVMHEALHNHYTQKSLSLSPGGGGSGGGGSGGGGSGGGGSGGGGSGGGGSDKTHTCPPCPAPELLGGPSVFLFPPKPKDTLMISRTPEVTCVVVDVSHEDPEVKFNWYVDGVEVHNAKTKPCEEQYGSTYRCVSVLTVLHQDWLNGKEYKCKVSNKALPAPIEKTISKAKGQPREPQVYTLPPSREEMTKNQVSLTCLVKGFYPSDIAVEWESNGQPENNYKTTPPVLDSDGSFFLYSKLTVDKSRWQQGNVFSCSVMHEALHNHYTQKSLSLSPGK

SEQ ID NO: 1829 - protein, 984 aa, Artificial Sequence
  Synthetic peptide
EVQLLESGGGLVQPGGSLRLSCAASGFTFSVYAMSWVRQAPGKGLEWVSTISGSGGSTFYAESVKGRFTISRDNSKNTLYLQMNRLRAEDTAVYYCARHDYSNYAYFDYWGQGTLVTVSSGGGGSGGGGSGGGGSEIVLTQSPGTLSLSPGERATLSCRASQSVRSSYLAWYQQKPGQAPRLLIYGASSRATGIPDRFSGSGSGTDFTLTISRLEPEDFAVYYCQQYGDLPFTFGPGTKVEIKSGGGGSEVQLVESGGGLVQPGGSLKLSCAASGFTFNKYAMNWVRQAPGKGLEWVARIRSKYNNYATYYADSVKDRFTISRDDSKNTAYLQMNNLKTEDTAVYYCVRHGNFGNSYISYWAYWGQGTLVTVSSGGGGSGGGGSGGGGSQTVVTQEPSLTVSPGGTVTLTCGSSTGAVTSGNYPNWVQQKPGQAPRGLIGGTKFLAPGTPARFSGSLLGGKAALTLSGVQPEDEAEYYCVLWYSNRWVFGGGTKLTVLGGGGDKTHTCPPCPAPELLGGPSVFLFPPKPKDTLMISRTPEVTCVVVDVSHEDPEVKFNWYVDGVEVHNAKTKPCEEQYGSTYRCVSVLTVLHQDWLNGKEYKCKVSNKALPAPIEKTISKAKGQPREPQVYTLPPSREEMTKNQVSLTCLVKGFYPSDIAVEWESNGQPENNYKTTPPVLDSDGSFFLYSKLTVDKSRWQQGNVFSCSVMHEALHNHYTQKSLSLSPGGGGSGGGGSGGGGSGGGGSGGGGSGGGGSDKTHTCPPCPAPELLGGPSVFLFPPKPKDTLMISRTPEVTCVVVDVSHEDPEVKFNWYVDGVEVHNAKTKPCEEQYGSTYRCVSVLTVLHQDWLNGKEYKCKVSNKALPAPIEKTISKAKGQPREPQVYTLPPSREEMTKNQVSLTCLVKGFYPSDIAVEWESNGQPENNYKTTPPVLDSDGSFFLYSKLTVDKSRWQQGNVFSCSVMHEALHNHYTQKSLSLSPGK

SEQ ID NO: 1830 - protein, 987 aa, Artificial Sequence
  Synthetic peptide
QVQLVESGGGVVQPGRSLRLSCAASGFMFSSYGMHWVRQAPGKCLEWVAVISYEGSNKYYAESVKGRFTISRDNSKNTLYLQMNSLRAEDTAVYYCARGRYYGSGNYNHGMDVWGQGTTVTVSSGGGGSGGGGSGGGGSDIQMTQSPSSLSASVGDRVTITCRASQSISSYLNWYQQKPGKAPKLLIYAASSLQSGVPSRFSGRGSGTDFTLTISSLQPEDFATYYCQQSYSTPFTFGCGTKVEIKSGGGGSEVQLVESGGGLVQPGGSLKLSCAASGFTFNKYAMNWVRQAPGKGLEWVARIRSKYNNYATYYADSVKDRFTISRDDSKNTAYLQMNNLKTEDTAVYYCVRHGNFGNSYISYWAYWGQGTLVTVSSGGGGSGGGGSGGGGSQTVVTQEPSLTVSPGGTVTLTCGSSTGAVTSGNYPNWVQQKPGQAPRGLIGGTKFLAPGTPARFSGSLLGGKAALTLSGVQPEDEAEYYCVLWYSNRWVFGGGTKLTVLGGGGDKTHTCPPCPAPELLGGPSVFLFPPKPKDTLMISRTPEVTCVVVDVSHEDPEVKFNWYVDGVEVHNAKTKPCEEQYGSTYRCVSVLTVLHQDWLNGKEYKCKVSNKALPAPIEKTISKAKGQPREPQVYTLPPSREEMTKNQVSLTCLVKGFYPSDIAVEWESNGQPENNYKTTPPVLDSDGSFFLYSKLTVDKSRWQQGNVFSCSVMHEALHNHYTQKSLSLSPGGGGSGGGGSGGGGSGGGGSGGGGSGGGGSDKTHTCPPCPAPELLGGPSVFLFPPKPKDTLMISRTPEVTCVVVDVSHEDPEVKFNWYVDGVEVHNAKTKPCEEQYGSTYRCVSVLTVLHQDWLNGKEYKCKVSNKALPAPIEKTISKAKGQPREPQVYTLPPSREEMTKNQVSLTCLVKGFYPSDIAVEWESNGQPENNYKTTPPVLDSDGSFFLYSKLTVDKSRWQQGNVFSCSVMHEALHNHYTQKSLSLSPGK

SEQ ID NO: 1831 - protein, 987 aa, Artificial Sequence
  Synthetic peptide
QVQLVESGGGVVQPGRSLRLSCAASGFMFSSYGMHWVRQAPGKGLEWVAVISYEGSNKYYAESVKGRFTISRDNSKNTLYLQMNSLRAEDTAVYYCARGRYYGSGNYNHGMDVWGQGTTVTVSSGGGGSGGGGSGGGGSDIQMTQSPSSLSASVGDRVTITCRASQSISSYLNWYQQKPGKAPKLLIYAASSLQSGVPSRFSGRGSGTDFTLTISSLQPEDFATYYCQQSYSTPFTFGPGTKVEIKSGGGGSEVQLVESGGGLVQPGGSLKLSCAASGFTFNKYAMNWVRQAPGKGLEWVARIRSKYNNYATYYADSVKDRFTISRDDSKNTAYLQMNNLKTEDTAVYYCVRHGNFGNSYISYWAYWGQGTLVTVSSGGGGSGGGGSGGGGSQTVVTQEPSLTVSPGGTVTLTCGSSTGAVTSGNYPNWVQQKPGQAPRGLIGGTKFLAPGTPARFSGSLLGGKAALTLSGVQPEDEAEYYCVLWYSNRWVFGGGTKLTVLGGGGDKTHTCPPCPAPELLGGPSVFLFPPKPKDTLMISRTPEVTCVVVDVSHEDPEVKFNWYVDGVEVHNAKTKPCEEQYGSTYRCVSVLTVLHQDWLNGKEYKCKVSNKALPAPIEKTISKAKGQPREPQVYTLPPSREEMTKNQVSLTCLVKGFYPSDIAVEWESNGQPENNYKTTPPVLDSDGSFFLYSKLTVDKSRWQQGNVFSCSVMHEALHNHYTQKSLSLSPGGGGSGGGGSGGGGSGGGGSGGGGSGGGGSDKTHTCPPCPAPELLGGPSVFLFPPKPKDTLMISRTPEVTCVVVDVSHEDPEVKFNWYVDGVEVHNAKTKPCEEQYGSTYRCVSVLTVLHQDWLNGKEYKCKVSNKALPAPIEKTISKAKGQPREPQVYTLPPSREEMTKNQVSLTCLVKGFYPSDIAVEWESNGQPENNYKTTPPVLDSDGSFFLYSKLTVDKSRWQQGNVFSCSVMHEALHNHYTQKSLSLSPGK

SEQ ID NO: 1832 - protein, 986 aa, Artificial Sequence
  Synthetic peptide
QVQLVESGGGVVQPGRSLRLSCAASGFTFSSYGMHWVRQAPGKCLEWVAVTWYDASNKYYGDAVKGRFTISRDNSKNTLYLQMNSLRAEDTAVYYCARDLLRGVKGYAMDVWGQGTTVTVSSGGGGSGGGGSGGGGSEIVLTQSPGTLSLSPGERATLSCRASQSLRRIYLAWYQQKPGQAPRLLIYDVFDRATGIPDRFSGGGSGTDFTLTISRLEPEDFAVYYCQQYSESPFTFGCGTKVDIKSGGGGSEVQLVESGGGLVQPGGSLKLSCAASGFTFNKYAMNWVRQAPGKGLEWVARIRSKYNNYATYYADSVKDRFTISRDDSKNTAYLQMNNLKTEDTAVYYCVRHGNFGNSYISYWAYWGQGTLVTVSSGGGGSGGGGSGGGGSQTVVTQEPSLTVSPGGTVTLTCGSSTGAVTSGNYPNWVQQKPGQAPRGLIGGTKFLAPGTPARFSGSLLGGKAALTLSGVQPEDEAEYYCVLWYSNRWVFGGGTKLTVLGGGGDKTHTCPPCPAPELLGGPSVFLFPPKPKDTLMISRTPEVTCVVVDVSHEDPEVKFNWYVDGVEVHNAKTKPCEEQYGSTYRCVSVLTVLHQDWLNGKEYKCKVSNKALPAPIEKTISKAKGQPREPQVYTLPPSREEMTKNQVSLTCLVKGFYPSDIAVEWESNGQPENNYKTTPPVLDSDGSFFLYSKLTVDKSRWQQGNVFSCSVMHEALHNHYTQKSLSLSPGGGGSGGGGSGGGGSGGGGSGGGGSGGGGSDKTHTCPPCPAPELLGGPSVFLFPPKPKDTLMISRTPEVTCVVVDVSHEDPEVKFNWYVDGVEVHNAKTKPCEEQYGSTYRCVSVLTVLHQDWLNGKEYKCKVSNKALPAPIEKTISKAKGQPREPQVYTLPPSREEMTKNQVSLTCLVKGFYPSDIAVEWESNGQPENNYKTTPPVLDSDGSFFLYSKLTVDKSRWQQGNVFSCSVMHEALHNHYTQKSLSLSPGK

SEQ ID NO: 1833 - protein, 986 aa, Artificial Sequence
  Synthetic peptide
QVQLVESGGGVVQPGRSLRLSCAASGFTFSSYGMHWVRQAPGKGLEWVAVTWYDASNKYYGDAVKGRFTISRDNSKNTLYLQMNSLRAEDTAVYYCARDLLRGVKGYAMDVWGQGTTVTVSSGGGGSGGGGSGGGGSEIVLTQSPGTLSLSPGERATLSCRASQSLRRIYLAWYQQKPGQAPRLLIYDVFDRATGIPDRFSGGGSGTDFTLTISRLEPEDFAVYYCQQYSESPFTFGPGTKVDIKSGGGGSEVQLVESGGGLVQPGGSLKLSCAASGFTFNKYAMNWVRQAPGKGLEWVARIRSKYNNYATYYADSVKDRFTISRDDSKNTAYLQMNNLKTEDTAVYYCVRHGNFGNSYISYWAYWGQGTLVTVSSGGGGSGGGGSGGGGSQTVVTQEPSLTVSPGGTVTLTCGSSTGAVTSGNYPNWVQQKPGQAPRGLIGGTKFLAPGTPARFSGSLLGGKAALTLSGVQPEDEAEYYCVLWYSNRWVFGGGTKLTVLGGGGDKTHTCPPCPAPELLGGPSVFLFPPKPKDTLMISRTPEVTCVVVDVSHEDPEVKFNWYVDGVEVHNAKTKPCEEQYGSTYRCVSVLTVLHQDWLNGKEYKCKVSNKALPAPIEKTISKAKGQPREPQVYTLPPSREEMTKNQVSLTCLVKGFYPSDIAVEWESNGQPENNYKTTPPVLDSDGSFFLYSKLTVDKSRWQQGNVFSCSVMHEALHNHYTQKSLSLSPGGGGSGGGGSGGGGSGGGGSGGGGSGGGGSDKTHTCPPCPAPELLGGPSVFLFPPKPKDTLMISRTPEVTCVVVDVSHEDPEVKFNWYVDGVEVHNAKTKPCEEQYGSTYRCVSVLTVLHQDWLNGKEYKCKVSNKALPAPIEKTISKAKGQPREPQVYTLPPSREEMTKNQVSLTCLVKGFYPSDIAVEWESNGQPENNYKTTPPVLDSDGSFFLYSKLTVDKSRWQQGNVFSCSVMHEALHNHYTQKSLSLSPGK

SEQ ID NO: 1834 - protein, 987 aa, Artificial Sequence
  Synthetic peptide
QVQLVQSGAEVKKPGASVKVSCKASGYTFTSYGISWVRQAPGQCLEWMGWISAYQGYTHYAQKLQGRVTMTTDTSTSTAYMELRSLRSDDTAVYYCARDYGGNDYYGMDVWGQGTTVTVSSGGGGSGGGGSGGGGSQSVLTQPPSASGTPGQRVTISCSGSSSNIGINYVYWYQQLPGTAPKLLIYRSDQRPSGVPDRFSGSKSGTSASLALSGLRSEDEADYYCAAFDESLSGVVFGCGTKLTVLSGGGGSEVQLVESGGGLVQPGGSLKLSCAASGFTFNKYAMNWVRQAPGKGLEWVARIRSKYNNYATYYADSVKDRFTISRDDSKNTAYLQMNNLKTEDTAVYYCVRHGNFGNSYISYWAYWGQGTLVTVSSGGGGSGGGGSGGGGSQTVVTQEPSLTVSPGGTVTLTCGSSTGAVTSGNYPNWVQQKPGQAPRGLIGGTKFLAPGTPARFSGSLLGGKAALTLSGVQPEDEAEYYCVLWYSNRWVFGGGTKLTVLGGGGDKTHTCPPCPAPELLGGPSVFLFPPKPKDTLMISRTPEVTCVVVDVSHEDPEVKFNWYVDGVEVHNAKTKPCEEQYGSTYRCVSVLTVLHQDWLNGKEYKCKVSNKALPAPIEKTISKAKGQPREPQVYTLPPSREEMTKNQVSLTCLVKGFYPSDIAVEWESNGQPENNYKTTPPVLDSDGSFFLYSKLTVDKSRWQQGNVFSCSVMHEALHNHYTQKSLSLSPGGGGSGGGGSGGGGSGGGGSGGGGSGGGGSDKTHTCPPCPAPELLGGPSVFLFPPKPKDTLMISRTPEVTCVVVDVSHEDPEVKFNWYVDGVEVHNAKTKPCEEQYGSTYRCVSVLTVLHQDWLNGKEYKCKVSNKALPAPIEKTISKAKGQPREPQVYTLPPSREEMTKNQVSLTCLVKGFYPSDIAVEWESNGQPENNYKTTPPVLDSDGSFFLYSKLTVDKSRWQQGNVFSCSVMHEALHNHYTQKSLSLSPGK

SEQ ID NO: 1835 - protein, 987 aa, Artificial Sequence
  Synthetic peptide
QVQLVQSGAEVKKPGASVKVSCKASGYTFTSYGISWVRQAPGQGLEWMGWISAYQGYTHYAQKLQGRVTMTTDTSTSTAYMELRSLRSDDTAVYYCARDYGGNDYYGMDVWGQGTTVTVSSGGGGSGGGGSGGGGSQSVLTQPPSASGTPGQRVTISCSGSSSNIGINYVYWYQQLPGTAPKLLIYRSDQRPSGVPDRFSGSKSGTSASLALSGLRSEDEADYYCAAFDESLSGVVFGGGTKLTVLSGGGGSEVQLVESGGGLVQPGGSLKLSCAASGFTFNKYAMNWVRQAPGKGLEWVARIRSKYNNYATYYADSVKDRFTISRDDSKNTAYLQMNNLKTEDTAVYYCVRHGNFGNSYISYWAYWGQGTLVTVSSGGGGSGGGGSGGGGSQTVVTQEPSLTVSPGGTVTLTCGSSTGAVTSGNYPNWVQQKPGQAPRGLIGGTKFLAPGTPARFSGSLLGGKAALTLSGVQPEDEAEYYCVLWYSNRWVFGGGTKLTVLGGGGDKTHTCPPCPAPELLGGPSVFLFPPKPKDTLMISRTPEVTCVVVDVSHEDPEVKFNWYVDGVEVHNAKTKPCEEQYGSTYRCVSVLTVLHQDWLNGKEYKCKVSNKALPAPIEKTISKAKGQPREPQVYTLPPSREEMTKNQVSLTCLVKGFYPSDIAVEWESNGQPENNYKTTPPVLDSDGSFFLYSKLTVDKSRWQQGNVFSCSVMHEALHNHYTQKSLSLSPGGGGSGGGGSGGGGSGGGGSGGGGSGGGGSDKTHTCPPCPAPELLGGPSVFLFPPKPKDTLMISRTPEVTCVVVDVSHEDPEVKFNWYVDGVEVHNAKTKPCEEQYGSTYRCVSVLTVLHQDWLNGKEYKCKVSNKALPAPIEKTISKAKGQPREPQVYTLPPSREEMTKNQVSLTCLVKGFYPSDIAVEWESNGQPENNYKTTPPVLDSDGSFFLYSKLTVDKSRWQQGNVFSCSVMHEALHNHYTQKSLSLSPGK

SEQ ID NO: 1836 - protein, 984 aa, Artificial Sequence
  Synthetic peptide
QAQLVESGGGVVQPGRSLRLSCAASGFTFSYYGMHWVRQAPGKCLEWVAVIWYDASNKYYADAVKGRFTISRDNSKNTLYLQMNSLRAEDTAVYYCARDREMGSRGDFDYWGQGTLVTVSSGGGGSGGGGSGGGGSDIQMTQSPSSLSASVGDRVTITCRASQGINNYLAWFQQKPGKAPKSLIYAVSILQSGVPSKFSGSGSGTDFTLTISNLQPEDFATYYCQQYNFYPFSFGCGTKVDIKSGGGGSEVQLVESGGGLVQPGGSLKLSCAASGFTFNKYAMNWVRQAPGKGLEWVARIRSKYNNYATYYADSVKDRFTISRDDSKNTAYLQMNNLKTEDTAVYYCVRHGNFGNSYISYWAYWGQGTLVTVSSGGGGSGGGGSGGGGSQTVVTQEPSLTVSPGGTVTLTCGSSTGAVTSGNYPNWVQQKPGQAPRGLIGGTKFLAPGTPARFSGSLLGGKAALTLSGVQPEDEAEYYCVLWYSNRWVFGGGTKLTVLGGGGDKTHTCPPCPAPELLGGPSVFLFPPKPKDTLMISRTPEVTCVVVDVSHEDPEVKFNWYVDGVEVHNAKTKPCEEQYGSTYRCVSVLTVLHQDWLNGKEYKCKVSNKALPAPIEKTISKAKGQPREPQVYTLPPSREEMTKNQVSLTCLVKGFYPSDIAVEWESNGQPENNYKTTPPVLDSDGSFFLYSKLTVDKSRWQQGNVFSCSVMHEALHNHYTQKSLSLSPGGGGSGGGGSGGGGSGGGGSGGGGSGGGGSDKTHTCPPCPAPELLGGPSVFLFPPKPKDTLMISRTPEVTCVVVDVSHEDPEVKFNWYVDGVEVHNAKTKPCEEQYGSTYRCVSVLTVLHQDWLNGKEYKCKVSNKALPAPIEKTISKAKGQPREPQVYTLPPSREEMTKNQVSLTCLVKGFYPSDIAVEWESNGQPENNYKTTPPVLDSDGSFFLYSKLTVDKSRWQQGNVFSCSVMHEALHNHYTQKSLSLSPGK

SEQ ID NO: 1837 - protein, 984 aa, Artificial Sequence
  Synthetic peptide
QAQLVESGGGVVQPGRSLRLSCAASGFTFSYYGMHWVRQAPGKGLEWVAVIWYDASNKYYADAVKGRFTISRDNSKNTLYLQMNSLRAEDTAVYYCARDREMGSRGDFDYWGQGTLVTVSSGGGGSGGGGSGGGGSDIQMTQSPSSLSASVGDRVTITCRASQGINNYLAWFQQKPGKAPKSLIYAVSILQSGVPSKFSGSGSGTDFTLTISNLQPEDFATYYCQQYNFYPFSFGQGTKVDIKSGGGGSEVQLVESGGGLVQPGGSLKLSCAASGFTFNKYAMNWVRQAPGKGLEWVARIRSKYNNYATYYADSVKDRFTISRDDSKNTAYLQMNNLKTEDTAVYYCVRHGNFGNSYISYWAYWGQGTLVTVSSGGGGSGGGGSGGGGSQTVVTQEPSLTVSPGGTVTLTCGSSTGAVTSGNYPNWVQQKPGQAPRGLIGGTKFLAPGTPARFSGSLLGGKAALTLSGVQPEDEAEYYCVLWYSNRWVFGGGTKLTVLGGGGDKTHTCPPCPAPELLGGPSVFLFPPKPKDTLMISRTPEVTCVVVDVSHEDPEVKFNWYVDGVEVHNAKTKPCEEQYGSTYRCVSVLTVLHQDWLNGKEYKCKVSNKALPAPIEKTISKAKGQPREPQVYTLPPSREEMTKNQVSLTCLVKGFYPSDIAVEWESNGQPENNYKTTPPVLDSDGSFFLYSKLTVDKSRWQQGNVFSCSVMHEALHNHYTQKSLSLSPGGGGSGGGGSGGGGSGGGGSGGGGSGGGGSDKTHTCPPCPAPELLGGPSVFLFPPKPKDTLMISRTPEVTCVVVDVSHEDPEVKFNWYVDGVEVHNAKTKPCEEQYGSTYRCVSVLTVLHQDWLNGKEYKCKVSNKALPAPIEKTISKAKGQPREPQVYTLPPSREEMTKNQVSLTCLVKGFYPSDIAVEWESNGQPENNYKTTPPVLDSDGSFFLYSKLTVDKSRWQQGNVFSCSVMHEALHNHYTQKSLSLSPGK

SEQ ID NO: 1838 - protein, 981 aa, Artificial Sequence
  Synthetic peptide
QVQLQQWGAGLLKPSETLSLTCAVYGGSFSGFYWSWIRQPPGKCLEWIGEIYHSGHATNNPSLKSRVTISLDTSKNQFSLKLNSVTAADTAVYYCARGGNSGYIFDYWGQGTLVTVSSGGGGSGGGGSGGGGSDVQMTQSPSSLSASVGDRVTITCRTSQYIGRYLNWYQQKPGKAPKVLIYGASTLQQGVPSRFSGSGSGTDFTLTITSLQPEDFASYYCQQTYSTPRTFGCGTKVEIKSGGGGSEVQLVESGGGLVQPGGSLKLSCAASGFTFNKYAMNWVRQAPGKGLEWVARIRSKYNNYATYYADSVKDRFTISRDDSKNTAYLQMNNLKTEDTAVYYCVRHGNFGNSYISYWAYWGQGTLVTVSSGGGGSGGGGSGGGGSQTVVTQEPSLTVSPGGTVTLTCGSSTGAVTSGNYPNWVQQKPGQAPRGLIGGTKFLAPGTPARFSGSLLGGKAALTLSGVQPEDEAEYYCVLWYSNRWVFGGGTKLTVLGGGGDKTHTCPPCPAPELLGGPSVFLFPPKPKDTLMISRTPEVTCVVVDVSHEDPEVKFNWYVDGVEVHNAKTKPCEEQYGSTYRCVSVLTVLHQDWLNGKEYKCKVSNKALPAPIEKTISKAKGQPREPQVYTLPPSREEMTKNQVSLTCLVKGFYPSDIAVEWESNGQPENNYKTTPPVLDSDGSFFLYSKLTVDKSRWQQGNVFSCSVMHEALHNHYTQKSLSLSPGGGGSGGGGSGGGGSGGGGSGGGGSGGGGSDKTHTCPPCPAPELLGGPSVFLFPPKPKDTLMISRTPEVTCVVVDVSHEDPEVKFNWYVDGVEVHNAKTKPCEEQYGSTYRCVSVLTVLHQDWLNGKEYKCKVSNKALPAPIEKTISKAKGQPREPQVYTLPPSREEMTKNQVSLTCLVKGFYPSDIAVEWESNGQPENNYKTTPPVLDSDGSFFLYSKLTVDKSRWQQGNVFSCSVMHEALHNHYTQKSLSLSPGK

SEQ ID NO: 1839 - protein, 981 aa, Artificial Sequence
  Synthetic peptide
QVQLQQWGAGLLKPSETLSLTCAVYGGSFSGFYWSWIRQPPGKGLEWIGEIYHSGHATNNPSLKSRVTISLDTSKNQFSLKLNSVTAADTAVYYCARGGNSGYIFDYWGQGTLVTVSSGGGGSGGGGSGGGGSDVQMTQSPSSLSASVGDRVTITCRTSQYIGRYLNWYQQKPGKAPKVLIYGASTLQQGVPSRFSGSGSGTDFTLTITSLQPEDFASYYCQQTYSTPRTFGQGTKVEIKSGGGGSEVQLVESGGGLVQPGGSLKLSCAASGFTFNKYAMNWVRQAPGKGLEWVARIRSKYNNYATYYADSVKDRFTISRDDSKNTAYLQMNNLKTEDTAVYYCVRHGNFGNSYISYWAYWGQGTLVTVSSGGGGSGGGGSGGGGSQTVVTQEPSLTVSPGGTVTLTCGSSTGAVTSGNYPNWVQQKPGQAPRGLIGGTKFLAPGTPARFSGSLLGGKAALTLSGVQPEDEAEYYCVLWYSNRWVFGGGTKLTVLGGGGDKTHTCPPCPAPELLGGPSVFLFPPKPKDTLMISRTPEVTCVVVDVSHEDPEVKFNWYVDGVEVHNAKTKPCEEQYGSTYRCVSVLTVLHQDWLNGKEYKCKVSNKALPAPIEKTISKAKGQPREPQVYTLPPSREEMTKNQVSLTCLVKGFYPSDIAVEWESNGQPENNYKTTPPVLDSDGSFFLYSKLTVDKSRWQQGNVFSCSVMHEALHNHYTQKSLSLSPGGGGSGGGGSGGGGSGGGGSGGGGSGGGGSDKTHTCPPCPAPELLGGPSVFLFPPKPKDTLMISRTPEVTCVVVDVSHEDPEVKFNWYVDGVEVHNAKTKPCEEQYGSTYRCVSVLTVLHQDWLNGKEYKCKVSNKALPAPIEKTISKAKGQPREPQVYTLPPSREEMTKNQVSLTCLVKGFYPSDIAVEWESNGQPENNYKTTPPVLDSDGSFFLYSKLTVDKSRWQQGNVFSCSVMHEALHNHYTQKSLSLSPGK

SEQ ID NO: 1840 - protein, 987 aa, Artificial Sequence
  Synthetic peptide
QVQLVESGGGVVQPGRSLRLSCAASGFTFSTYGMHWVRQAPGKCLEWVAVIWYEGSNKYYGESVKGRFTISRDNSKNTLYLQMNSLRAEDTAVYYCARDNSHYYYGMDVWGQGTTVTVSSGGGGSGGGGSGGGGSQSVLTQPPSVSGAPGQRVTISCTGSSSNIGAGYDVNWYQQFPGTAPKLLIYVNNNRPSGVPDRFSGSTSGTSASLAITGLQAEDEADYYCQSYDTSLSASVFGCGTRLTVLSGGGGSEVQLVESGGGLVQPGGSLKLSCAASGFTFNKYAMNWVRQAPGKGLEWVARIRSKYNNYATYYADSVKDRFTISRDDSKNTAYLQMNNLKTEDTAVYYCVRHGNFGNSYISYWAYWGQGTLVTVSSGGGGSGGGGSGGGGSQTVVTQEPSLTVSPGGTVTLTCGSSTGAVTSGNYPNWVQQKPGQAPRGLIGGTKFLAPGTPARFSGSLLGGKAALTLSGVQPEDEAEYYCVLWYSNRWVFGGGTKLTVLGGGGDKTHTCPPCPAPELLGGPSVFLFPPKPKDTLMISRTPEVTCVVVDVSHEDPEVKFNWYVDGVEVHNAKTKPCEEQYGSTYRCVSVLTVLHQDWLNGKEYKCKVSNKALPAPIEKTISKAKGQPREPQVYTLPPSREEMTKNQVSLTCLVKGFYPSDIAVEWESNGQPENNYKTTPPVLDSDGSFFLYSKLTVDKSRWQQGNVFSCSVMHEALHNHYTQKSLSLSPGGGGSGGGGSGGGGSGGGGSGGGGSGGGGSDKTHTCPPCPAPELLGGPSVFLFPPKPKDTLMISRTPEVTCVVVDVSHEDPEVKFNWYVDGVEVHNAKTKPCEEQYGSTYRCVSVLTVLHQDWLNGKEYKCKVSNKALPAPIEKTISKAKGQPREPQVYTLPPSREEMTKNQVSLTCLVKGFYPSDIAVEWESNGQPENNYKTTPPVLDSDGSFFLYSKLTVDKSRWQQGNVFSCSVMHEALHNHYTQKSLSLSPGK

SEQ ID NO: 1841 - protein, 987 aa, Artificial Sequence
  Synthetic peptide
QVQLVESGGGVVQPGRSLRLSCAASGFTFSTYGMHWVRQAPGKGLEWVAVIWYEGSNKYYGESVKGRFTISRDNSKNTLYLQMNSLRAEDTAVYYCARDNSHYYYGMDVWGQGTTVTVSSGGGGSGGGGSGGGGSQSVLTQPPSVSGAPGQRVTISCTGSSSNIGAGYDVNWYQQFPGTAPKLLIYVNNNRPSGVPDRFSGSTSGTSASLAITGLQAEDEADYYCQSYDTSLSASVFGGGTRLTVLSGGGGSEVQLVESGGGLVQPGGSLKLSCAASGFTFNKYAMNWVRQAPGKGLEWVARIRSKYNNYATYYADSVKDRFTISRDDSKNTAYLQMNNLKTEDTAVYYCVRHGNFGNSYISYWAYWGQGTLVTVSSGGGGSGGGGSGGGGSQTVVTQEPSLTVSPGGTVTLTCGSSTGAVTSGNYPNWVQQKPGQAPRGLIGGTKFLAPGTPARFSGSLLGGKAALTLSGVQPEDEAEYYCVLWYSNRWVFGGGTKLTVLGGGGDKTHTCPPCPAPELLGGPSVFLFPPKPKDTLMISRTPEVTCVVVDVSHEDPEVKFNWYVDGVEVHNAKTKPCEEQYGSTYRCVSVLTVLHQDWLNGKEYKCKVSNKALPAPIEKTISKAKGQPREPQVYTLPPSREEMTKNQVSLTCLVKGFYPSDIAVEWESNGQPENNYKTTPPVLDSDGSFFLYSKLTVDKSRWQQGNVFSCSVMHEALHNHYTQKSLSLSPGGGGSGGGGSGGGGSGGGGSGGGGSGGGGSDKTHTCPPCPAPELLGGPSVFLFPPKPKDTLMISRTPEVTCVVVDVSHEDPEVKFNWYVDGVEVHNAKTKPCEEQYGSTYRCVSVLTVLHQDWLNGKEYKCKVSNKALPAPIEKTISKAKGQPREPQVYTLPPSREEMTKNQVSLTCLVKGFYPSDIAVEWESNGQPENNYKTTPPVLDSDGSFFLYSKLTVDKSRWQQGNVFSCSVMHEALHNHYTQKSLSLSPGK

SEQ ID NO: 1842 - protein, 987 aa, Artificial Sequence
  Synthetic peptide
QVQLVESGGGVVQPGRSLRLSCAASGFTFSTYGMHWVRQAPGKCLEWVAVIWYEGSNKYYGESVKGRFTISRDNSKNTLYLQMNSLRAEDTAVYYCARDNSHYYYGMDVWGQGTLVTVSSGGGGSGGGGSGGGGSQSVLTQPPSVSGAPGQRVTISCTGSSSNIGAGYDVNWYQQLPGTAPKLLIYVNNNRPSGVPDRFSGSKSGTSASLAITGLQAEDEADYYCQSYETSLSASVFGCGTRLTVLSGGGGSEVQLVESGGGLVQPGGSLKLSCAASGFTFNKYAMNWVRQAPGKGLEWVARIRSKYNNYATYYADSVKDRFTISRDDSKNTAYLQMNNLKTEDTAVYYCVRHGNFGNSYISYWAYWGQGTLVTVSSGGGGSGGGGSGGGGSQTVVTQEPSLTVSPGGTVTLTCGSSTGAVTSGNYPNWVQQKPGQAPRGLIGGTKFLAPGTPARFSGSLLGGKAALTLSGVQPEDEAEYYCVLWYSNRWVFGGGTKLTVLGGGGDKTHTCPPCPAPELLGGPSVFLFPPKPKDTLMISRTPEVTCVVVDVSHEDPEVKFNWYVDGVEVHNAKTKPCEEQYGSTYRCVSVLTVLHQDWLNGKEYKCKVSNKALPAPIEKTISKAKGQPREPQVYTLPPSREEMTKNQVSLTCLVKGFYPSDIAVEWESNGQPENNYKTTPPVLDSDGSFFLYSKLTVDKSRWQQGNVFSCSVMHEALHNHYTQKSLSLSPGGGGSGGGGSGGGGSGGGGSGGGGSGGGGSDKTHTCPPCPAPELLGGPSVFLFPPKPKDTLMISRTPEVTCVVVDVSHEDPEVKFNWYVDGVEVHNAKTKPCEEQYGSTYRCVSVLTVLHQDWLNGKEYKCKVSNKALPAPIEKTISKAKGQPREPQVYTLPPSREEMTKNQVSLTCLVKGFYPSDIAVEWESNGQPENNYKTTPPVLDSDGSFFLYSKLTVDKSRWQQGNVFSCSVMHEALHNHYTQKSLSLSPGK

SEQ ID NO: 1843 - protein, 987 aa, Artificial Sequence
  Synthetic peptide
QVQLVESGGGVVQPGRSLRLSCAASGFTFSTYGMHWVRQAPGKGLEWVAVIWYEGSNKYYGESVKGRFTISRDNSKNTLYLQMNSLRAEDTAVYYCARDNSHYYYGMDVWGQGTLVTVSSGGGGSGGGGSGGGGSQSVLTQPPSVSGAPGQRVTISCTGSSSNIGAGYDVNWYQQLPGTAPKLLIYVNNNRPSGVPDRFSGSKSGTSASLAITGLQAEDEADYYCQSYETSLSASVFGGGTRLTVLSGGGGSEVQLVESGGGLVQPGGSLKLSCAASGFTFNKYAMNWVRQAPGKGLEWVARIRSKYNNYATYYADSVKDRFTISRDDSKNTAYLQMNNLKTEDTAVYYCVRHGNFGNSYISYWAYWGQGTLVTVSSGGGGSGGGGSGGGGSQTVVTQEPSLTVSPGGTVTLTCGSSTGAVTSGNYPNWVQQKPGQAPRGLIGGTKFLAPGTPARFSGSLLGGKAALTLSGVQPEDEAEYYCVLWYSNRWVFGGGTKLTVLGGGGDKTHTCPPCPAPELLGGPSVFLFPPKPKDTLMISRTPEVTCVVVDVSHEDPEVKFNWYVDGVEVHNAKTKPCEEQYGSTYRCVSVLTVLHQDWLNGKEYKCKVSNKALPAPIEKTISKAKGQPREPQVYTLPPSREEMTKNQVSLTCLVKGFYPSDIAVEWESNGQPENNYKTTPPVLDSDGSFFLYSKLTVDKSRWQQGNVFSCSVMHEALHNHYTQKSLSLSPGGGGSGGGGSGGGGSGGGGSGGGGSGGGGSDKTHTCPPCPAPELLGGPSVFLFPPKPKDTLMISRTPEVTCVVVDVSHEDPEVKFNWYVDGVEVHNAKTKPCEEQYGSTYRCVSVLTVLHQDWLNGKEYKCKVSNKALPAPIEKTISKAKGQPREPQVYTLPPSREEMTKNQVSLTCLVKGFYPSDIAVEWESNGQPENNYKTTPPVLDSDGSFFLYSKLTVDKSRWQQGNVFSCSVMHEALHNHYTQKSLSLSPGK

SEQ ID NO: 1844 - protein, 983 aa, Artificial Sequence
  Synthetic peptide
QMQLQESGPGLVKPSETLSLTCTVSGGSIESGVYYWSWIRQPPGKCLEWIGYIYYSGSTSYNPSLKSRLTMSVDTSKNQFSLKLSSVTAADTAVYYCARSGYSYALFDYWGQGTLVTVSSGGGGSGGGGSGGGGSDIQMTQSPSSLSASLGDRVTITCRASQSVDRYFNWYQQKPGKAPKVLIFAASSLQSGVPSRFSGSGSGTDFTLTISSLQPEDFATYYCQQSYSTPWTFGCGTKVEVKSGGGGSEVQLVESGGGLVQPGGSLKLSCAASGFTFNKYAMNWVRQAPGKGLEWVARIRSKYNNYATYYADSVKDRFTISRDDSKNTAYLQMNNLKTEDTAVYYCVRHGNFGNSYISYWAYWGQGTLVTVSSGGGGSGGGGSGGGGSQTVVTQEPSLTVSPGGTVTLTCGSSTGAVTSGNYPNWVQQKPGQAPRGLIGGTKFLAPGTPARFSGSLLGGKAALTLSGVQPEDEAEYYCVLWYSNRWVFGGGTKLTVLGGGGDKTHTCPPCPAPELLGGPSVFLFPPKPKDTLMISRTPEVTCVVVDVSHEDPEVKFNWYVDGVEVHNAKTKPCEEQYGSTYRCVSVLTVLHQDWLNGKEYKCKVSNKALPAPIEKTISKAKGQPREPQVYTLPPSREEMTKNQVSLTCLVKGFYPSDIAVEWESNGQPENNYKTTPPVLDSDGSFFLYSKLTVDKSRWQQGNVFSCSVMHEALHNHYTQKSLSLSPGGGGSGGGGSGGGGSGGGGSGGGGSGGGGSDKTHTCPPCPAPELLGGPSVFLFPPKPKDTLMISRTPEVTCVVVDVSHEDPEVKFNWYVDGVEVHNAKTKPCEEQYGSTYRCVSVLTVLHQDWLNGKEYKCKVSNKALPAPIEKTISKAKGQPREPQVYTLPPSREEMTKNQVSLTCLVKGFYPSDIAVEWESNGQPENNYKTTPPVLDSDGSFFLYSKLTVDKSRWQQGNVFSCSVMHEALHNHYTQKSLSLSPGK

SEQ ID NO: 1845 - protein, 983 aa, Artificial Sequence
  Synthetic peptide
QMQLQESGPGLVKPSETLSLTCTVSGGSIESGVYYWSWIRQPPGKGLEWIGYIYYSGSTSYNPSLKSRLTMSVDTSKNQFSLKLSSVTAADTAVYYCARSGYSYALFDYWGQGTLVTVSSGGGGSGGGGSGGGGSDIQMTQSPSSLSASLGDRVTITCRASQSVDRYFNWYQQKPGKAPKVLIFAASSLQSGVPSRFSGSGSGTDFTLTISSLQPEDFATYYCQQSYSTPWTFGQGTKVEVKSGGGGSEVQLVESGGGLVQPGGSLKLSCAASGFTFNKYAMNWVRQAPGKGLEWVARIRSKYNNYATYYADSVKDRFTISRDDSKNTAYLQMNNLKTEDTAVYYCVRHGNFGNSYISYWAYWGQGTLVTVSSGGGGSGGGGSGGGGSQTVVTQEPSLTVSPGGTVTLTCGSSTGAVTSGNYPNWVQQKPGQAPRGLIGGTKFLAPGTPARFSGSLLGGKAALTLSGVQPEDEAEYYCVLWYSNRWVFGGGTKLTVLGGGGDKTHTCPPCPAPELLGGPSVFLFPPKPKDTLMISRTPEVTCVVVDVSHEDPEVKFNWYVDGVEVHNAKTKPCEEQYGSTYRCVSVLTVLHQDWLNGKEYKCKVSNKALPAPIEKTISKAKGQPREPQVYTLPPSREEMTKNQVSLTCLVKGFYPSDIAVEWESNGQPENNYKTTPPVLDSDGSFFLYSKLTVDKSRWQQGNVFSCSVMHEALHNHYTQKSLSLSPGGGGSGGGGSGGGGSGGGGSGGGGSGGGGSDKTHTCPPCPAPELLGGPSVFLFPPKPKDTLMISRTPEVTCVVVDVSHEDPEVKFNWYVDGVEVHNAKTKPCEEQYGSTYRCVSVLTVLHQDWLNGKEYKCKVSNKALPAPIEKTISKAKGQPREPQVYTLPPSREEMTKNQVSLTCLVKGFYPSDIAVEWESNGQPENNYKTTPPVLDSDGSFFLYSKLTVDKSRWQQGNVFSCSVMHEALHNHYTQKSLSLSPGK

SEQ ID NO: 1846 - protein, 983 aa, Artificial Sequence
  Synthetic peptide
QVQLQESGPGLVKPSQTLSLTCTVSGDSIISGGYYWSWIRQPPGKCLEWIGYIFYSGSTDYNPSLKSRVTISVDTSKNQFSLKLSSVTAADTAVYYCARSGYSYALFDAWGQGTLVTVSSGGGGSGGGGSGGGGSDIQMTQSPSSLSASVGDRVTISCRASQFIGRYFNWYQQKPGKAPKVLIYAESSLQSGVPSRFSGSGSGTEFTLTISSLQPEDFATYYCQQSYSTPWTFGCGTKVEIKSGGGGSEVQLVESGGGLVQPGGSLKLSCAASGFTFNKYAMNWVRQAPGKGLEWVARIRSKYNNYATYYADSVKDRFTISRDDSKNTAYLQMNNLKTEDTAVYYCVRHGNFGNSYISYWAYWGQGTLVTVSSGGGGSGGGGSGGGGSQTVVTQEPSLTVSPGGTVTLTCGSSTGAVTSGNYPNWVQQKPGQAPRGLIGGTKFLAPGTPARFSGSLLGGKAALTLSGVQPEDEAEYYCVLWYSNRWVFGGGTKLTVLGGGGDKTHTCPPCPAPELLGGPSVFLFPPKPKDTLMISRTPEVTCVVVDVSHEDPEVKFNWYVDGVEVHNAKTKPCEEQYGSTYRCVSVLTVLHQDWLNGKEYKCKVSNKALPAPIEKTISKAKGQPREPQVYTLPPSREEMTKNQVSLTCLVKGFYPSDIAVEWESNGQPENNYKTTPPVLDSDGSFFLYSKLTVDKSRWQQGNVFSCSVMHEALHNHYTQKSLSLSPGGGGSGGGGSGGGGSGGGGSGGGGSGGGGSDKTHTCPPCPAPELLGGPSVFLFPPKPKDTLMISRTPEVTCVVVDVSHEDPEVKFNWYVDGVEVHNAKTKPCEEQYGSTYRCVSVLTVLHQDWLNGKEYKCKVSNKALPAPIEKTISKAKGQPREPQVYTLPPSREEMTKNQVSLTCLVKGFYPSDIAVEWESNGQPENNYKTTPPVLDSDGSFFLYSKLTVDKSRWQQGNVFSCSVMHEALHNHYTQKSLSLSPGK

SEQ ID NO: 1847 - protein, 983 aa, Artificial Sequence
  Synthetic peptide
QVQLQESGPGLVKPSQTLSLTCTVSGDSIISGGYYWSWIRQPPGKGLEWIGYIFYSGSTDYNPSLKSRVTISVDTSKNQFSLKLSSVTAADTAVYYCARSGYSYALFDAWGQGTLVTVSSGGGGSGGGGSGGGGSDIQMTQSPSSLSASVGDRVTISCRASQFIGRYFNWYQQKPGKAPKVLIYAESSLQSGVPSRFSGSGSGTEFTLTISSLQPEDFATYYCQQSYSTPWTFGQGTKVEIKSGGGGSEVQLVESGGGLVQPGGSLKLSCAASGFTFNKYAMNWVRQAPGKGLEWVARIRSKYNNYATYYADSVKDRFTISRDDSKNTAYLQMNNLKTEDTAVYYCVRHGNFGNSYISYWAYWGQGTLVTVSSGGGGSGGGGSGGGGSQTVVTQEPSLTVSPGGTVTLTCGSSTGAVTSGNYPNWVQQKPGQAPRGLIGGTKFLAPGTPARFSGSLLGGKAALTLSGVQPEDEAEYYCVLWYSNRWVFGGGTKLTVLGGGGDKTHTCPPCPAPELLGGPSVFLFPPKPKDTLMISRTPEVTCVVVDVSHEDPEVKFNWYVDGVEVHNAKTKPCEEQYGSTYRCVSVLTVLHQDWLNGKEYKCKVSNKALPAPIEKTISKAKGQPREPQVYTLPPSREEMTKNQVSLTCLVKGFYPSDIAVEWESNGQPENNYKTTPPVLDSDGSFFLYSKLTVDKSRWQQGNVFSCSVMHEALHNHYTQKSLSLSPGGGGSGGGGSGGGGSGGGGSGGGGSGGGGSDKTHTCPPCPAPELLGGPSVFLFPPKPKDTLMISRTPEVTCVVVDVSHEDPEVKFNWYVDGVEVHNAKTKPCEEQYGSTYRCVSVLTVLHQDWLNGKEYKCKVSNKALPAPIEKTISKAKGQPREPQVYTLPPSREEMTKNQVSLTCLVKGFYPSDIAVEWESNGQPENNYKTTPPVLDSDGSFFLYSKLTVDKSRWQQGNVFSCSVMHEALHNHYTQKSLSLSPGK

SEQ ID NO: 1848 - protein, 227 aa, Artificial Sequence
  Synthetic peptide
DKTHTCPPCPAPELLGGPSVFLFPPKPKDTLMISRTPEVTCVVVDVSHEDPEVKFNWYVDGVEVHNAKTKPCEEQYGSTYRCVSVLTVLHQDWLNGKEYKCKVSNKALPAPIEKTISKAKGQPREPQVYTLPPSREEMTKNQVSLTCLVKGFYPSDIAVEWESNGQPENNYKTTPPVLDSDGSFFLYSKLTVDKSRWQQGNVFSCSVMHEALHNHYTQKSLSLSPGK

SEQ ID NO: 1849 - protein, 225 aa, Artificial Sequence
  Synthetic peptide
DKTHTCPPCPAPELLGGPSVFLFPPKPKDTLMISRTPEVTCVVVDVSHEDPEVKFNWYVDGVEVHNAKTKPCEEQYGSTYRCVSVLTVLHQDWLNGKEYKCKVSNKALPAPIEKTISKAKGQPREPQVYTLPPSREEMTKNQVSLTCLVKGFYPSDIAVEWESNGQPENNYKTTPPVLDSDGSFFLYSKLTVDKSRWQQGNVFSCSVMHEALHNHYTQKSLSLSP

SEQ ID NO: 1850 - protein, 227 aa, Artificial Sequence
  Synthetic peptide
DKTHTCPPCPAPELLGGPSVFLFPPKPKDTLMISRTPEVTCVVVDVSHEDPEVKFNWYVDGVEVHNAKTKPREEQYNSTYRVVSVLTVLHQDWLNGKEYKCKVSNKALPAPIEKTISKAKGQPREPQVYTLPPSREEMTKNQVSLTCLVKGFYPSDIAVEWESNGQPENNYKTTPPVLDSDGSFFLYSKLTVDKSRWQQGNVFSCSVMHEALHNHYTQKSLSLSPGK

SEQ ID NO: 1851 - protein, 225 aa, Artificial Sequence
  Synthetic peptide
DKTHTCPPCPAPELLGGPSVFLFPPKPKDTLMISRTPEVTCVVVDVSHEDPEVKFNWYVDGVEVHNAKTKPREEQYNSTYRVVSVLTVLHQDWLNGKEYKCKVSNKALPAPIEKTISKAKGQPREPQVYTLPPSREEMTKNQVSLTCLVKGFYPSDIAVEWESNGQPENNYKTTPPVLDSDGSFFLYSKLTVDKSRWQQGNVFSCSVMHEALHNHYTQKSLSLSP

SEQ ID NO: 1852 - protein, 227 aa, Artificial Sequence
  Synthetic peptide
DKTHTCPPCPAPELLGGPSVFLFPPKPKDTLMISRTPEVTCVVVDVSHEDPEVKFNWYVDGVEVHNAKTKPREEQYGSTYRVVSVLTVLHQDWLNGKEYKCKVSNKALPAPIEKTISKAKGQPREPQVYTLPPSREEMTKNQVSLTCLVKGFYPSDIAVEWESNGQPENNYKTTPPVLDSDGSFFLYSKLTVDKSRWQQGNVFSCSVMHEALHNHYTQKSLSLSPGK

SEQ ID NO: 1853 - protein, 225 aa, Artificial Sequence
  Synthetic peptide
DKTHTCPPCPAPELLGGPSVFLFPPKPKDTLMISRTPEVTCVVVDVSHEDPEVKFNWYVDGVEVHNAKTKPREEQYGSTYRVVSVLTVLHQDWLNGKEYKCKVSNKALPAPIEKTISKAKGQPREPQVYTLPPSREEMTKNQVSLTCLVKGFYPSDIAVEWESNGQPENNYKTTPPVLDSDGSFFLYSKLTVDKSRWQQGNVFSCSVMHEALHNHYTQKSLSLSP

SEQ ID NO: 1854 - protein, 227 aa, Artificial Sequence
  Synthetic peptide
DKTHTCPPCPAPELLGGPSVFLFPPKPKDTLMISRTPEVTCVVVDVSHEDPEVKFNWYVDGVEVHNAKTKPCEEQYNSTYRCVSVLTVLHQDWLNGKEYKCKVSNKALPAPIEKTISKAKGQPREPQVYTLPPSREEMTKNQVSLTCLVKGFYPSDIAVEWESNGQPENNYKTTPPVLDSDGSFFLYSKLTVDKSRWQQGNVFSCSVMHEALHNHYTQKSLSLSPGK

SEQ ID NO: 1855 - protein, 225 aa, Artificial Sequence
  Synthetic peptide
DKTHTCPPCPAPELLGGPSVFLFPPKPKDTLMISRTPEVTCVVVDVSHEDPEVKFNWYVDGVEVHNAKTKPCEEQYNSTYRCVSVLTVLHQDWLNGKEYKCKVSNKALPAPIEKTISKAKGQPREPQVYTLPPSREEMTKNQVSLTCLVKGFYPSDIAVEWESNGQPENNYKTTPPVLDSDGSFFLYSKLTVDKSRWQQGNVFSCSVMHEALHNHYTQKSLSLSP

SEQ ID NO: 1856 - protein, 484 aa, Artificial Sequence
  Synthetic peptide
DKTHTCPPCPAPELLGGPSVFLFPPKPKDTLMISRTPEVTCVVVDVSHEDPEVKFNWYVDGVEVHNAKTKPCEEQYGSTYRCVSVLTVLHQDWLNGKEYKCKVSNKALPAPIEKTISKAKGQPREPQVYTLPPSREEMTKNQVSLTCLVKGFYPSDIAVEWESNGQPENNYKTTPPVLDSDGSFFLYSKLTVDKSRWQQGNVFSCSVMHEALHNHYTQKSLSLSPGKGGGGSGGGGSGGGGSGGGGSGGGGSGGGGSDKTHTCPPCPAPELLGGPSVFLFPPKPKDTLMISRTPEVTCVVVDVSHEDPEVKFNWYVDGVEVHNAKTKPCEEQYGSTYRCVSVLTVLHQDWLNGKEYKCKVSNKALPAPIEKTISKAKGQPREPQVYTLPPSREEMTKNQVSLTCLVKGFYPSDIAVEWESNGQPENNYKTTPPVLDSDGSFFLYSKLTVDKSRWQQGNVFSCSVMHEALHNHYTQKSLSLSPGK

SEQ ID NO: 1857 - protein, 480 aa, Artificial Sequence
  Synthetic peptide
DKTHTCPPCPAPELLGGPSVFLFPPKPKDTLMISRTPEVTCVVVDVSHEDPEVKFNWYVDGVEVHNAKTKPCEEQYGSTYRCVSVLTVLHQDWLNGKEYKCKVSNKALPAPIEKTISKAKGQPREPQVYTLPPSREEMTKNQVSLTCLVKGFYPSDIAVEWESNGQPENNYKTTPPVLDSDGSFFLYSKLTVDKSRWQQGNVFSCSVMHEALHNHYTQKSLSLSPGGGGSGGGGSGGGGSGGGGSGGGGSGGGGSDKTHTCPPCPAPELLGGPSVFLFPPKPKDTLMISRTPEVTCVVVDVSHEDPEVKFNWYVDGVEVHNAKTKPCEEQYGSTYRCVSVLTVLHQDWLNGKEYKCKVSNKALPAPIEKTISKAKGQPREPQVYTLPPSREEMTKNQVSLTCLVKGFYPSDIAVEWESNGQPENNYKTTPPVLDSDGSFFLYSKLTVDKSRWQQGNVFSCSVMHEALHNHYTQKSLSLSP

SEQ ID NO: 1858 - protein, 484 aa, Artificial Sequence
  Synthetic peptide
DKTHTCPPCPAPELLGGPSVFLFPPKPKDTLMISRTPEVTCVVVDVSHEDPEVKFNWYVDGVEVHNAKTKPREEQYNSTYRVVSVLTVLHQDWLNGKEYKCKVSNKALPAPIEKTISKAKGQPREPQVYTLPPSREEMTKNQVSLTCLVKGFYPSDIAVEWESNGQPENNYKTTPPVLDSDGSFFLYSKLTVDKSRWQQGNVFSCSVMHEALHNHYTQKSLSLSPGKGGGGSGGGGSGGGGSGGGGSGGGGSGGGGSDKTHTCPPCPAPELLGGPSVFLFPPKPKDTLMISRTPEVTCVVVDVSHEDPEVKFNWYVDGVEVHNAKTKPREEQYNSTYRVVSVLTVLHQDWLNGKEYKCKVSNKALPAPIEKTISKAKGQPREPQVYTLPPSREEMTKNQVSLTCLVKGFYPSDIAVEWESNGQPENNYKTTPPVLDSDGSFFLYSKLTVDKSRWQQGNVFSCSVMHEALHNHYTQKSLSLSPGK

SEQ ID NO: 1859 - protein, 480 aa, Artificial Sequence
  Synthetic peptide
DKTHTCPPCPAPELLGGPSVFLFPPKPKDTLMISRTPEVTCVVVDVSHEDPEVKFNWYVDGVEVHNAKTKPREEQYNSTYRVVSVLTVLHQDWLNGKEYKCKVSNKALPAPIEKTISKAKGQPREPQVYTLPPSREEMTKNQVSLTCLVKGFYPSDIAVEWESNGQPENNYKTTPPVLDSDGSFFLYSKLTVDKSRWQQGNVFSCSVMHEALHNHYTQKSLSLSPGGGGSGGGGSGGGGSGGGGSGGGGSGGGGSDKTHTCPPCPAPELLGGPSVFLFPPKPKDTLMISRTPEVTCVVVDVSHEDPEVKFNWYVDGVEVHNAKTKPREEQYNSTYRVVSVLTVLHQDWLNGKEYKCKVSNKALPAPIEKTISKAKGQPREPQVYTLPPSREEMTKNQVSLTCLVKGFYPSDIAVEWESNGQPENNYKTTPPVLDSDGSFFLYSKLTVDKSRWQQGNVFSCSVMHEALHNHYTQKSLSLSP

SEQ ID NO: 1860 - protein, 484 aa, Artificial Sequence
  Synthetic peptide
DKTHTCPPCPAPELLGGPSVFLFPPKPKDTLMISRTPEVTCVVVDVSHEDPEVKFNWYVDGVEVHNAKTKPREEQYGSTYRVVSVLTVLHQDWLNGKEYKCKVSNKALPAPIEKTISKAKGQPREPQVYTLPPSREEMTKNQVSLTCLVKGFYPSDIAVEWESNGQPENNYKTTPPVLDSDGSFFLYSKLTVDKSRWQQGNVFSCSVMHEALHNHYTQKSLSLSPGKGGGGSGGGGSGGGGSGGGGSGGGGSGGGGSDKTHTCPPCPAPELLGGPSVFLFPPKPKDTLMISRTPEVTCVVVDVSHEDPEVKFNWYVDGVEVHNAKTKPREEQYGSTYRVVSVLTVLHQDWLNGKEYKCKVSNKALPAPIEKTISKAKGQPREPQVYTLPPSREEMTKNQVSLTCLVKGFYPSDIAVEWESNGQPENNYKTTPPVLDSDGSFFLYSKLTVDKSRWQQGNVFSCSVMHEALHNHYTQKSLSLSPGK

SEQ ID NO: 1861 - protein, 480 aa, Artificial Sequence
  Synthetic peptide
DKTHTCPPCPAPELLGGPSVFLFPPKPKDTLMISRTPEVTCVVVDVSHEDPEVKFNWYVDGVEVHNAKTKPREEQYGSTYRVVSVLTVLHQDWLNGKEYKCKVSNKALPAPIEKTISKAKGQPREPQVYTLPPSREEMTKNQVSLTCLVKGFYPSDIAVEWESNGQPENNYKTTPPVLDSDGSFFLYSKLTVDKSRWQQGNVFSCSVMHEALHNHYTQKSLSLSPGGGGSGGGGSGGGGSGGGGSGGGGSGGGGSDKTHTCPPCPAPELLGGPSVFLFPPKPKDTLMISRTPEVTCVVVDVSHEDPEVKFNWYVDGVEVHNAKTKPREEQYGSTYRVVSVLTVLHQDWLNGKEYKCKVSNKALPAPIEKTISKAKGQPREPQVYTLPPSREEMTKNQVSLTCLVKGFYPSDIAVEWESNGQPENNYKTTPPVLDSDGSFFLYSKLTVDKSRWQQGNVFSCSVMHEALHNHYTQKSLSLSP

SEQ ID NO: 1862 - protein, 484 aa, Artificial Sequence
  Synthetic peptide
DKTHTCPPCPAPELLGGPSVFLFPPKPKDTLMISRTPEVTCVVVDVSHEDPEVKFNWYVDGVEVHNAKTKPCEEQYNSTYRCVSVLTVLHQDWLNGKEYKCKVSNKALPAPIEKTISKAKGQPREPQVYTLPPSREEMTKNQVSLTCLVKGFYPSDIAVEWESNGQPENNYKTTPPVLDSDGSFFLYSKLTVDKSRWQQGNVFSCSVMHEALHNHYTQKSLSLSPGKGGGGSGGGGSGGGGSGGGGSGGGGSGGGGSDKTHTCPPCPAPELLGGPSVFLFPPKPKDTLMISRTPEVTCVVVDVSHEDPEVKFNWYVDGVEVHNAKTKPCEEQYNSTYRCVSVLTVLHQDWLNGKEYKCKVSNKALPAPIEKTISKAKGQPREPQVYTLPPSREEMTKNQVSLTCLVKGFYPSDIAVEWESNGQPENNYKTTPPVLDSDGSFFLYSKLTVDKSRWQQGNVFSCSVMHEALHNHYTQKSLSLSPGK

SEQ ID NO: 1863 - protein, 480 aa, Artificial Sequence
  Synthetic peptide
DKTHTCPPCPAPELLGGPSVFLFPPKPKDTLMISRTPEVTCVVVDVSHEDPEVKFNWYVDGVEVHNAKTKPCEEQYNSTYRCVSVLTVLHQDWLNGKEYKCKVSNKALPAPIEKTISKAKGQPREPQVYTLPPSREEMTKNQVSLTCLVKGFYPSDIAVEWESNGQPENNYKTTPPVLDSDGSFFLYSKLTVDKSRWQQGNVFSCSVMHEALHNHYTQKSLSLSPGGGGSGGGGSGGGGSGGGGSGGGGSGGGGSDKTHTCPPCPAPELLGGPSVFLFPPKPKDTLMISRTPEVTCVVVDVSHEDPEVKFNWYVDGVEVHNAKTKPCEEQYNSTYRCVSVLTVLHQDWLNGKEYKCKVSNKALPAPIEKTISKAKGQPREPQVYTLPPSREEMTKNQVSLTCLVKGFYPSDIAVEWESNGQPENNYKTTPPVLDSDGSFFLYSKLTVDKSRWQQGNVFSCSVMHEALHNHYTQKSLSLSP

SEQ ID NO: 1864 - protein, 20 aa, Artificial Sequence
  Synthetic peptide
GGGGSGGGGSGGGGSGGGGS

SEQ ID NO: 1865 - protein, 25 aa, Artificial Sequence
  Synthetic peptide
GGGGSGGGGSGGGGSGGGGSGGGGS

SEQ ID NO: 1866 - protein, 30 aa, Artificial Sequence
  Synthetic peptide
GGGGSGGGGSGGGGSGGGGSGGGGSGGGGS

SEQ ID NO: 1867 - protein, 35 aa, Artificial Sequence
  Synthetic peptide
GGGGSGGGGSGGGGSGGGGSGGGGSGGGGSGGGGS

SEQ ID NO: 1868 - protein, 40 aa, Artificial Sequence
  Synthetic peptide
GGGGSGGGGSGGGGSGGGGSGGGGSGGGGSGGGGSGGGGS

SEQ ID NO: 1869 - protein, 5 aa, Artificial Sequence
  Synthetic peptide
  MISC_FEATURE (1)..(1): Xaa is S, T or V
  MISC_FEATURE (3)..(3): Xaa is A or S
  MISC_FEATURE (5)..(5): Xaa is S or N
XYXMX

SEQ ID NO: 1870 - protein, 17 aa, Artificial Sequence
  Synthetic peptide
  misc_feature (1)..(1): Xaa is A, Y, V, L, or T
  misc_feature (4)..(4): Xaa is G or S
  misc_feature (8)..(8): Xaa is R, Y, S, G or I
  misc_feature (9)..(9): Xaa is T, I, P, or A
  misc_feature (10)..(10): Xaa is F, Y, N, Q or D
  misc_feature (11)..(11): Xaa is Y or F
  misc_feature (16)..(16): Xaa is E, K or Q
XISXSGGXXXXAESVXG

SEQ ID NO: 1871 - protein, 11 aa, Artificial Sequence
  Synthetic peptide
  MISC_FEATURE (1)..(1): Xaa is H, G or V
  MISC_FEATURE (7)..(7): Xaa is P, A, L or F
  MISC_FEATURE (8)..(8): Xaa is Y or F
XDYSNYXXFDY

SEQ ID NO: 1872 - protein, 12 aa, Artificial Sequence
  Synthetic peptide
  MISC_FEATURE (3)..(3): Xaa is S or G
  MISC_FEATURE (5)..(5): Xaa is S or G
  MISC_FEATURE (6)..(6): Xaa is I or V
  MISC_FEATURE (7)..(7): Xaa is R, S or no amino acid
  MISC_FEATURE (8)..(8): Xaa is S or G
  MISC_FEATURE (9)..(9): Xaa is S, N, T or D
  MISC_FEATURE (10)..(10): Xaa is Y or no amino acid
  MISC_FEATURE (12)..(12): Xaa is A or G
RAXQXXXXXXLX

SEQ ID NO: 1873 - protein, 7 aa, Artificial Sequence
  Synthetic peptide
  MISC_FEATURE (1)..(1): Xaa is G or A
  MISC_FEATURE (2)..(2): Xaa is A or S
  MISC_FEATURE (4)..(4): Xaa is S, T, N or I
  MISC_FEATURE (5)..(5): Xaa is R or L
  MISC_FEATURE (6)..(6): Xaa is A or Q
  MISC_FEATURE (7)..(7): Xaa is T or S
XXSXXXX

SEQ ID NO: 1874 - protein, 9 aa, Artificial Sequence
  Synthetic peptide
  MISC_FEATURE (4)..(4): Xaa is G, Y or F
  MISC_FEATURE (5)..(5): Xaa is D, S, Y, I or A
  MISC_FEATURE (6)..(6): Xaa is L, T, S or Y
  MISC_FEATURE (8)..(8): Xaa is F, L, P or I
  MISC_FEATURE (9)..(9): Xaa is T or P
QQYXXXPXX

SEQ ID NO: 1875 - protein, 5 aa, Artificial Sequence
  Synthetic peptide
  MISC_FEATURE (1)..(1): Xaa is S, T or V
XYAMS

SEQ ID NO: 1876 - protein, 17 aa, Artificial Sequence
  Synthetic peptide
  MISC_FEATURE (1)..(1): Xaa is A, V, L or T
  MISC_FEATURE (8)..(8): Xaa is R, S, or G
  MISC_FEATURE (9)..(9): Xaa is T, P or A
  MISC_FEATURE (10)..(10): Xaa is F, N, Y or Q
  MISC_FEATURE (16)..(16): Xaa is E, K, or Q
XISGSGGXXXYAESVXG

SEQ ID NO: 1877 - protein, 11 aa, Artificial Sequence
  Synthetic peptide
  MISC_FEATURE (1)..(1): Xaa is H or V
  MISC_FEATURE (7)..(7): Xaa is P, L or A
  MISC_FEATURE (8)..(8): Xaa is Y or F
XDYSNYXXFDY

SEQ ID NO: 1878 - protein, 12 aa, Artificial Sequence
  Synthetic peptide
  MISC_FEATURE (3)..(3): Xaa is S or G
  MISC_FEATURE (5)..(5): Xaa is S or G
  MISC_FEATURE (6)..(6): Xaa is I or V
  MISC_FEATURE (7)..(7): Xaa is R or S
  MISC_FEATURE (8)..(8): Xaa is S or G
  MISC_FEATURE (9)..(9): Xaa is S, T, N or D
  MISC_FEATURE (12)..(12): Xaa is A or G
RAXQXXXXXYLX

SEQ ID NO: 1879 - protein, 7 aa, Artificial Sequence
  Synthetic peptide
  MISC_FEATURE (4)..(4): Xaa is T or I
AASXLQS

SEQ ID NO: 1880 - protein, 7 aa, Artificial Sequence
  Synthetic peptide
  MISC_FEATURE (2)..(2): Xaa is A or S
  MISC_FEATURE (4)..(4): Xaa is S or N
GXSXRAT

SEQ ID NO: 1881 - protein, 9 aa, Artificial Sequence
  Synthetic peptide
  MISC_FEATURE (5)..(5): Xaa is D, Y, S or I
  MISC_FEATURE (6)..(6): Xaa is L, S or T
  MISC_FEATURE (8)..(8): Xaa is F or P
  MISC_FEATURE (9)..(9): Xaa is T or P
QQYGXXPXX
